(19) United States
(12) Patent Application Publication
(10) Pub. No.: US 2004/0110792 A1
(43) Pub. Date: Jun. 10, 2004

(54) Methods for assessing and treating leukemia

(76) Inventor: Mitch Raponi, San Diego, CA (US)

Correspondence Address: PHILIP S. JOHNSON, JOHNSON & JOHNSON, ONE JOHNSON & JOHNSON PLAZA, NEW BRUNSWICK, NJ, 08933-7003, US

(21) Appl. No.: 10/283,975

(22) Filed: Oct. 30, 2002

Related U.S. Application Data
(60) Provisional application No. 60/340,938, filed on Oct. 30, 2001.
(60) Provisional application No. 60/338,997, filed on Oct. 30, 2001.
(60) Provisional application No. 60/340,081, filed on Oct. 30, 2001.
(60) Provisional application No. 60/341,012, filed on Oct. 30, 2001.

(51) Int. Cl. A61K 31/4709; C12Q 1/68

(52) U.S. Cl. 514/312; 435/6

(57) ABSTRACT

Methods for treating leukemia patients include analyzing gene expression profiles of a patient to determine whether the patient is likely to respond to treatment with farnesyl transferase inhibitor (FTI) and, optionally, other therapeutics. The methods are also useful for monitoring patient therapy and for selecting a course of therapy. Genes modulated in response to FTI treatment are provided and are used in formulating the profiles.

[0001] This application claims the benefit of the following U.S. Provisional applications: 60/340,938; 60/338,997; 60/340,081; and 60/341,012. This invention relates to diagnostics, prognostics, and treatments for leukemia based on the gene expression profiles of leukemia cells.

### BACKGROUND

[0002] Some molecules, such as Ras, that are implicated in cancers must be farnesylated by the farnesyl transferase enzyme in order to interact with the inner leaflet of the plasma membrane of the cell and become involved in various signaling pathways. Ras is not the only protein implicated in cancer that has a CAAX box that is prenylated. Farnesyl transferase inhibitors (FTIs) are therapeutic agents that inhibit the covalent attachment of the carbon farnesyl moieties to the C-terminal CAAX motif of various proteins. They have utility in the treatment of cancers and proliferative disorders such as leukemia. Acute myclogenous leukemia (AML) is among the diseases that can most beneficially be addressed with FTIs.

[0003] As is true in the case of many treatment regimens, some patients respond to treatment with FTIs and others do not. Prescribing the treatment to a patient who is unlikely to respond to it is not desirable. Thus, it would be useful to know how a patient could be expected to respond to such treatment before a drug is administered so that non-responders would not be unnecessarily treated and so that those with the best chance of benefiting from the drug are properly treated and monitored. Further, of those who respond to treatment, there may be varying degrees of response. Treatment with therapeutics other than FTIs or treatment with therapeutics in addition to FTIs may be beneficial for those patients who would not respond to FTIs or in whom response to FTIs alone is less than desired.

### SUMMARY OF THE INVENTION

[0004] The invention is a method of treating a patient with leukemia with an FTI. In one such method, the patient's gene expression profile is analyzed to determine whether the patient is likely to respond to the FTI and treating a patient with the FTI if they are likely to respond.

[0005] In another aspect of the invention, a patient with leukemia is monitored for treatment with an FTI in which the patient's gene expression profile is analyzed to determine whether the patient is responding to the FTI and treating a patient with the FTI if they are likely to respond in a desirable fashion.

[0006] In yet another aspect of the invention, a patient is treated if the gene expression profile shows up regulation of one or more particular genes indicative of FTI responders.

[0007] In yet another aspect of the invention, gene expression profiles indicative of FTI responders are those which show at least a 1.5, 1.7, or 2 fold difference relative to FTI non-responders.

[0008] In yet another aspect of the invention, a patient is treated if the gene expression profile shows down regulation of one or more particular genes indicative of FTI responders In yet another aspect of the invention, a patient is treated if the gene expression profile shows modulation of a gene selected from the group of genes identified in Tables 1-3 infra.

[0009] In yet another aspect of the invention, the FTI is a quinilone or quinoline derivative.

[0010] In yet another aspect of the invention, the FTI is (B)-6-[amino(420 chlorophenyl)(1-methyl-1H-imidazol-5-yl)methyl]-4-(3-chlorophenyl)-1-methyl-2(1H)-quinolinone).

[0011] Articles used in practicing the methods are also an aspect of the invention. Such articles include gene expression profiles or representations of them that are fixed in computer readable media. Other articles according to the invention include nucleic acid arrays used to determine the gene expression profiles of the invention.

[0012] In another aspect of the invention, a method of treating a patient with leukemia comprises administering an FTI and a therapeutic composition that modulates the MAPK/ERK signaling pathways, TGFβ, WNT or apoptotic pathways.

[0013] In another aspect of the invention, the patient is treated with an FTI and a therapeutic composition selected from the group consisting of tyrosine kinase inhibitors, MEK kinase inhibitors, PI3K kinase inhibitors, MAP kinase inhibitors, apoptosis modulators and combinations thereof.

[0014] In yet another aspect of this invention, the gene expression profile of a patient with leukemia is analyzed to determine whether the patient is likely to respond to an FTI or if the patient would likely benefit from the combination of an FTI and another drug. The patient is then treated with such combination or, if the patient is unlikely to respond to an FTI, the patient is treated with drug selected from the group consisting of tyrosine kinase inhibitors, MEK kinase inhibitors, PI3K kinase inhibitors, MAP kinase inhibitors, apoptosis modulators and combinations thereof.

### BRIEF DESCRIPTION OF THE DRAWINGS

[0015] FIG. 1 is an example of a graphical display of gene expression patterns used to analyze the gene expression profiles of this invention.

[0016] FIG. 2 is a schematic diagram of the MAPK/ERK pathway.

[0017] FIG. 3 is a schematic diagram of the TGFβ and Wnt pathway.

[0018] FIG. 4 is a schematic diagram of the apoptotic pathway.

### DETAILED DESCRIPTION

[0019] The therapeutic agents referred to in this specification are FTIs. They take on a multitude of forms but share the essential inhibitory function of interfering with or lessening the farnesylation of proteins implicated in cancer and proliferative diseases. Preferably, the FTIs are those indicated for the treatment of leukemias such as AML. A patient who responds to an FTI is one in whom a reduction of more than 50% of blast cells is seen in bone marrow following treatment with the FTI.

[0020] Numerous FTIs are within the scope of the invention and include those described in U.S. Patents: U.S. Pat. No. 5,976,851 to Brown et al; U.S. Pat. No. 5,972,984 to Anthony et al.; U.S. Pat. No. 5,972,966 to deSolms; U.S. Pat. No. 5,968,965 to Dinsmore et al.; U.S. Pat. No. 5,968,952 to Venet et al.; U.S. Pat. No. 6,187,786 to Venet et al.; U.S. Pat. No. 6,169,096 to Venet et al.; U.S. Pat. No. 6,037,350 to Venet et. al.; U.S. Pat. No. 6,177,432 to Angibaud et al.; U.S. Pat. No. 5,965,578 to Graham et al.; U.S. Pat. No. 5,965,539 to Sebti et al.; U.S. Pat. No. 5,958,939 to Afonso et al.; U.S. Pat. No. 5,939,557 to Anthony et al.; U.S. Pat. No. 5,936,097 to Commercon et al.; U.S. Pat. No. 5,891,889 to Anthony et al.; U.S. Pat. No. 5,889,053 to Baudin et al.; U.S. Pat. No. 5,880,140 to Anthony; U.S. Pat. No. 5,872,135 to deSolms; U.S. Pat. No. 5,869,682 to deSolms; U.S. Pat. No. 5,861,529 to Baudoin; U.S. Pat. No. 5,859,015 to Graham et al.; U.S. Pat. No. 5,856,439 to Clerc; U.S. Pat. No. 5,856,326 to Anthony et al.; U.S. Pat. No. 5,852,010 to Graham et al.; U.S. Pat. No. 5,843,941 to Marsters et al.; U.S. Pat. No. 5,807,852 to Doll; U.S. Pat. No. 5,780,492 to Dinsmore et al.; U.S. Pat. No. 5,773,455 to Dong et al.; U.S. Pat. No. 5,767,274 to Kim et al.; U.S. Pat. No. 5,756,528 to Anthony et al.; U.S. Pat. No. 5,750,567 to Baudoin et al.; U.S. Pat. No. 5,721,236 to Bishop et al,; U.S. Pat. No. 5,700,806 to Doll et al.; U.S. Pat. No. 5,661,161 to Anthony et al.; U.S. Pat. No. 5,602,098 to Sebti et al.; U.S. Pat. No. 5,585,359 to Breslin et al.; U.S. Pat. No. 5,578,629 to Ciccarone et al.; U.S. Pat. No. 5,534,537 to Ciccarone et al.; U.S. Pat. No. 5,532,359 to Marsters et al.; U.S. Pat. No. 5,523,430 to Patel et al.; U.S. Pat. No. 5,504,212 to de Solms et al.; U.S. Pat. No. 5,491,164 to deSolms et al.; U.S. Pat. No. 5,420,245 to Brown et al.; and U.S. Pat. No. 5,238,922 to Graham et al. each of which is incorporated herein by reference. Non-peptidal, so-called “small molecule” therapeutics are preferred. More preferred FTIs are quinolines or quinoline derivatives such as:

[0021] 7-(3-chlorophenyl)-9-[(4-chlorophenyl)-1H-imidazol-1-ylmethyl]-2,3-dihydro-1H,5H-benzo[ij]quinolizin-5-one,

[0022] 7-(3-chlorophenyl)-9-[(4-chlorophenyl)-1H-imidazol-1-ylmethyl]-1,2-dihydro-4H-pyrrolo[3,2,1-ij]quinoline-4-one,

[0023] 8-[amino(4-chlorophenyl)(1-methyl-1H-imidazol-5-yl)methyl]-6-(3-chlorophen yl)-1,2-dihydro-4H-pyrrolo[3,2,1-ij]quinolin-4-one, and

[0024] 8-[amino(4-chlorophenyl)(1-methyl-1H-imidazol-5-yl)methyl]-6-(3-chloropheny l)-2,3-dihydro-1H,5H-benzo[ij]quinolizin-5-one.

[0025] The most preferred FTI is (B)-6-[amino(4-chlorophenyl)(1-methyl-1H-imidazol-5-yl)methyl]-4-(3-chlorophenyl)-1-methyl-2(1H)-quinolinone).

[0026] In the aspect of the invention comprising treating leukemia with FTIs and other therapeutic agents, The therapeutic agents referred to in this specification are those that have an effect on the biological pathway explicated through the gene expression analysis of leukemic cells subjected to treatment with quinilone-based FTIs.

[0027] The mere presence of nucleic acid sequences having the potential to express proteins or peptides (“genes”) within the genome is not determinative of whether a protein or peptide is expressed in a given cell. Whether or not a given gene capable of expressing proteins or peptides does so and to what extent such expression occurs, if at all, is determined by a variety of complex factors. Irrespective of difficulties in understanding and assessing these factors, assaying gene expression can provide useful information about the cellular response to a given stimulus such as the introduction of a drug or other therapeutic agent. Relative indications of the degree to which genes are active or inactive can be found in gene expression profiles. The gene expression profiles of this invention are used to identify and treat patients who will likely benefit from a given therapy or exclude patients from a given therapy where the patient likely would experience little or no beneficial response to the drug or therapy.

[0028] Preferred methods for establishing gene expression profiles (including those used to arrive at the explication of the relevant biological pathways) include determining the amount of RNA that is produced by a gene that can code for a protein or peptide. This is accomplished by reverse transcription PCR (RT-PCR), competitive RT-PCR, real time RT-PCR, differential display RT-PCR, Northern Blot analysis and other related tests. While it is possible to conduct these techniques using individual PCR reactions, it is best to amplify copy DNA (cDNA) or copy RNA (cRNA) produced from mRNA and analyze it via microarray. A number of different array configurations and methods for their production are known to those of skill in the art and are described in U.S. Patents such as: U.S. Pat. Nos. 5,445,934; 5,532,128; 5,556,752; 5,242,974; 5,384,261; 5,405,783; 5,412,087; 5,424,186; 5,429,807; 5,436,327; 5,472,672; 5,527,681; 5,529,756; 5,545,531; 5,554,501; 5,561,071; 5,571,639; 5,593,839; 5,599,695; 5,624,711; 5,658,734; and 5,700,637; the disclosures of which are herein incorporated by reference.

[0029] Microarray technology allows for the measurement of the steady-state mRNA level of thousands of genes simultaneously thereby presenting a powerful tool for identifying the effect of FTIs on cell biology and the likely effect of treatment based on analysis of such effects. Two microarray technologies are currently in wide use. The first are cDNA arrays and the second are oligonucleotide arrays. Although differences exist in the construction of these chips, essentially all downstream data analysis and output are the same. The product of these analyses are typically measurements of the intensity of the signal received from a labeled probe used to detect a cDNA sequence from the sample that hybridizes to a nucleic acid sequence at a known location on the microarray. Typically, the intensity of the signal is proportional to the quantity of cDNA, and thus mRNA, expressed in the sample cells. A large number of such techniques are available and useful. Preferred methods for determining gene expression can be found in U.S. Pat. No. 6,271,002 to Linsley, et al.; U.S. Pat. No. 6,218,122 to Friend, et al.; U.S. Pat. No. 6,218,114 to Peck, et al.; and U.S. Pat. No. 6,004,755 to Wang, et al., the disclosure of each of which is incorporated herein by reference.

[0030] Analysis of the expression levels is conducted by comparing such intensities. This is best done by generating a ratio matrix of the expression intensities of genes in a test sample versus those in a control sample. For instance, the gene expression intensities from a tissue that has been treated with a drug can be compared with the expression intensities generated from the same tissue that has not been treated with the drug. A ratio of these expression intensities indicates the fold-change in gene expression between the test and control samples.

[0031] Gene expression profiles can also be displayed in a number of ways. The most common method is to arrange a ratio matrix into a graphical dendogram where columns indicate test samples and rows indicate genes. The data is arranged so genes that have similar expression profiles are proximal to each other (e.g., FIG. 1). The expression ratio for each gene is visualized as a color. For example, a ratio less than one (indicating down-regulation) may appear in the blue portion of the spectrum while a ratio greater than one (indicating up-regulation) may appear as a color in the red portion of the specrtum. Commercially available computer software programs are available to display such data including “OMNIVIZ PRO” software from Batelle and “TREE VIEW” software from Stanford The genes that are differentially expressed are either up regulated or down regulated in diseased cells following treatment with an FTI. Up regulation and down regulation are relative terms meaning that a detectable difference (beyond the contribution of noise in the system used to measure it) is found in the amount of expression of the genes relative to some baseline. In this case, the baseline is the measured gene expression of the untreated diseased cell. The genes of interest in the treated diseased cells are then either up regulated or down regulated relative to the baseline level using the same measurement method. Preferably, levels of up and down regulation are distinguished based on fold changes of the intensity measurements of hybridized microarray probes. A 1.5 fold difference is preferred for making such distinctions. That is, before a gene is said to be differentially expressed in treated versus untreated diseased cells, the treated cell is found to yield at least 1.5 times more, or 1.5 times less intensity than the untreated cells. A 1.7 fold difference is more preferred and a 2 or more fold difference in gene expression measurement is most preferred. Table 3 lists genes that were commonly modulated across all cell lines and in responder samples.

[0032] A portfolio of genes is a set of genes grouped so that information obtained about them provides the basis for making a clinically relevant judgment such as a diagnosis, prognosis, or treatment choice. In this case, the judgments supported by the portfolios involve the treatment of leukemias with FTIs. Portfolios of gene expression profiles can be comprised of combinations of genes shown in Tables 1-3.

[0033] One method of the invention involves comparing gene expression profiles for various genes to determine whether a person is likely to respond to the use of a therapeutic agent. Having established the gene expression profiles that distinguish responder from nonresponder, the gene expression profiles of each are fixed in a medium such as a computer readable medium as described below. A patient sample is obtained that contains diseased cells (such as hematopoietic blast cells in the case of AML) is then obtained. Sample RNA is then obtained and amplified from the diseased patient cell and a gene expression profile is obtained, preferably via micro-array, for genes in the appropriate portfolios. The expression profiles of the samples are then compared to those previously determined as responder and non-responder. If the sample expression patterns are consistent with an FTI responder expression pattern then treatment with an FTI could be indicated (in the absence of countervailing medical considerations). If the sample expression patterns are consistent with an FTI non-responder expression pattern then treatment with an FTI would not be indicated. Preferably, consistency of expression patterns is determined based on intensity measurements of micro-array reading as described above.

[0034] In similar fashion, gene expression profile analysis can be conducted to monitor treatment response. In one aspect of this method, gene expression analysis as described above is conducted on a patient treated with an FTI at various periods throughout the course of treatment. If the gene expression patterns are consistent with a responder then the patient's therapy is continued. If it is not, then the patient's therapy is altered as with additional therapeutics such as tyrosine kinase inhibitor, changes to the dosage, or elimination of FTI treatment. Such analysis permits intervention and therapy adjustment prior to detectable clinical indicia or in the face of otherwise ambiguous clinical indicia.

[0035] It is possible to attain ambiguous results in which some gene expression profiles are recorded that are in some respects indicative of a responder and in other respects indicative of a non-responder. For example, the profiles may show that three genes are up-regulated consistent with a responder but that another gene is not up-regulated as would ordinarily be the case for a responder. In such a case, statistical algorithms can be applied to determine the probability that the patient will respond or not respond to the drug. Statistical algorithms suitable for this purpose are well known and are available.

[0036] Articles of this invention are representations of the gene expression profiles useful for treating, diagnosing, prognosticating, staging, and otherwise assessing diseases that are reduced to a medium that can be automatically read such as computer readable media (magnetic, optical, and the like). The articles can also include instructions for assessing the gene expression profiles in such media. For example, the articles may comprise a CD ROM having computer instructions for comparing gene expression profiles of the portfolios of genes described above. The articles may also have gene expression profiles digitally recorded therein so that they may be compared with gene expression data from patient samples. Alternatively, the profiles can be recorded in different representational format. A graphical recordation is one such format. FIG. 1 shows an example of the graphical display of such a recordation. Clustering algorithms such as those incorporated in “OMNIVIZ” and “TREE VIEW” computer programs mentioned above can best assist in the visualization of such data.

[0037] Additional articles according to the invention are nucleic acid arrays (e.g. cDNA or oligonucleotide arrays), as described above, configured to discern the gene expression profiles of the invention.

[0038] Using clustering analysis (including the algorithms mentioned above) one can compare the expression levels of patient samples to establish regulatory relationships among genes with a certain statistical confidence. A dynamic map was constructed based upon such expression data. Such a genetic network map is useful for drug discovery. For example, once basic genes of interest were identified, a list of potential up-stream regulatory genes was found using such a genetic network map. The genes so identified or their expression products were then analyzed for their use as drug targets. In some embodiments, the regulatory function of the particular genes identified was used to identify therapeutics for use in treating leukemia.

[0039] The regulation of transcription, RNA processing and RNA editing are all accomplished by proteins which are coded by their own genes. In addition, DNA sequences can exert long range control over the expression of other genes by positional effects. Therefore, the expression of genes is often regulated by the expression of other genes. Those regulatory genes are called upstream genes, relative to the regulated or down-stream genes. In a simple regulatory pathway:

A++>B−−>C++>D

[0040] where: A, B, C, D are genes

[0041] ++up-regulates

[0042] −−down-regulates

[0043] Gene A is an up-stream gene of gene B and B is an up-stream gene of C. One of skill in the art would appreciate that the network is frequently looped and inter-connected. In some instances, the expression of a gene is regulated by its own product as either a positive or negative feedback.

[0044] Cluster analysis methods were used to group genes whose expression level is correlated. Methods for cluster analysis are described in detail in Harfigan (1975) Clustering Algorithms, NY, John Wile and Sons, Inc, and Everritt, (1980) Cluster Analysis 2nd. Ed. London Heineman Educational books, Ltd., incorporated herein for all purposed by reference. Path analysis was used to decompose relations among variables and for testing causal models for the genetic networks. Multiple primary targets of a drug in leukemic cells were identified as were drugs/drug classes useful in treating such cells. According to the current invention, drugs are any compounds of any degree of complexity that perturb a biological system.

[0045] The biological effect of a drug may be a consequence of drug-mediated changes in the rate of transcription or degradation of one or more species of RNA, the rate or extent of translation or post-translational processing of one or more polypeptides, the rate or extent of the degradation of one or more proteins, the inhibition or stimulation of the action or activity of one or more proteins, and so forth. In addition to the FTIs that are preferred, the preferred drugs of this invention are those that modulate the MAPK/ERK signaling pathways, TGFβ, WNT or apoptotic pathways. These include, without limitation, tyrosine kinase inhibitors, MEK kinase inhibitors, P13K kinase inhibitors, MAP kinase inhibitors, apoptosis modulators and combinations thereof. Exemplary drugs that are most preferred among these are the “GLEEVEC” tyrosine kinase inhibitor of Novartis, U-0126 MAP kinase inhibitor, PD-098059 MAP kinase inhibitor, SB-203580 MAP kinase inhibitor, and antisense, ribozyme, and DNAzyme Bcl-XL anti-apoptotics. Examples of other useful drugs include, without limitation, the calanolides of U.S. Pat. No. 6,306,897; the substituted bicyclics of U.S. Pat. No. 6,284,764; the indolines of U.S. Pat. No. 6,133,305; and the antisense oligonucleotides of U.S. Pat. No. 6,271,210.

[0046] As noted, the drugs of the instant invention can be therapeutics directed to gene therapy or antisense therapy. Oligonucleotides with sequences complementary to a mRNA sequence can be introduced into cells to block the translation of the mRNA, thus blocking the function of the gene encoding the mRNA. The use of oligonucleotides to block gene expression is described, for example, in, Strachan and Read, Human Molecular Genetics, 1996, incorporated herein by reference.

[0047] These antisense molecules may be DNA, stable derivatives of DNA such as phosphorothioates or methylphosphonates, RNA, stable derivatives of RNA such as 2′-O-alkylRNA, or other antisense oligonucleotide mimetics. Antisense molecules may be introduced into cells by microinjection, liposome encapsulation or by expression from vectors harboring the antisense sequence.

[0048] In the case of gene therapy, the gene of interest can be ligated into viral vectors that mediate transfer of the therapeutic DNA by infection of recipient host cells. Suitable viral vectors include retrovirus, adenovirus, adeno-associated virus, herpes virus, vaccinia virus, polio virus and the like. Alternatively, therapeutic DNA can be transferred into cells for gene therapy by non-viral techniques including receptor-mediated targeted DNA transfer using ligand-DNA conjugates or adenovirus-ligand-DNA conjugates, lipofection membrane fusion or direct microinjection. These procedures and variations thereof are suitable for ex vivo as well as in vivo gene therapy. Protocols for molecular methodology of gene therapy suitable for use with the gene is described in Gene Therapy Protocols, edited by Paul D. Robbins, Human press, Totawa N.J., 1996.

[0049] Pharmaceutically useful compositions comprising the drugs of this invention may be formulated according to known methods such as by the admixture of a pharmaceutically acceptable carrier. Examples of such carriers and methods of formulation may be found in Remington's Pharmaceutical Sciences. To form a pharmaceutically acceptable composition suitable for effective administration, such compositions will contain an effective amount of the drug. The effective amount of the drug may vary according to a variety of factors such as the individual's condition, weight, sex and age. Other factors include the mode of administration. The pharmaceutical compositions may be provided to the individual by a variety of routes such as subcutaneous, topical, oral and intramuscular.

[0050] The drugs of this invention include chemical derivatives of the base molecules of the drug. That is, they may contain additional chemical moieties that are not normally a part of the base molecule. Such moieties may improve the solubility, half-life, absorption, etc. of the base molecule. Alternatively the moieties may attenuate undesirable side effects of the base molecule or decrease the toxicity of the base molecule. Examples of such moieties are described in a variety of texts, such as Remington's Pharmaceutical Sciences.

[0051] Compounds identified according to the methods disclosed herein may be used alone at appropriate dosages defined by routine testing in order to obtain optimal inhibition or activity while minimizing any potential toxicity. In addition, coadministration or sequential administration of other agents may be desirable.

[0052] The drugs of this invention can be administered in a wide variety of therapeutic dosage forms in conventional vehicles for administration. For example, the drugs can be administered in such oral dosage forms as tablets, capsules (each including timed release and sustained release formulations), pills, powders, granules, elixirs, tinctures, solutions, suspensions, syrups and emulsions, or by injection. Likewise, they may also be administered in intravenous (both bolus and infusion), intraperitoneal, subcutaneous, topical with or without occlusion, or intramuscular form, all using forms well known to those of ordinary skill in the pharmaceutical arts. An effective but non-toxic amount of the compound desired can be employed as a modulating agent.

[0053] The daily dosage of the products may be varied over a wide range from 0.01 to 1,000 mg per patient, per day. For oral administration, the compositions are preferably provided in the form of scored or unscored tablets containing 0.01, 0.05, 0.1, 0.5, 1.0, 2.5, 5.0, 10.0, 15.0, 25.0, and 50.0 milligrams of the active ingredient for the symptomatic adjustment of the dosage to the patient to be treated. An effective amount of the drug is ordinarily supplied at a dosage level of from about 0.0001 mg/kg to about 100 mg/kg of body weight per day. The range is more particularly from about 0.001 mg/kg to 10 mg/kg of body weight per day. The dosages are adjusted when combined to achieve desired effects. On the other hand, dosages of these various agents may be independently optimized and combined to achieve a synergistic result wherein the pathology is reduced more than it would be if either agent were used alone.

[0054] Advantageously, compounds or modulators used in the present invention may be administered in a single daily dose, or the total daily dosage may be administered in divided doses of two, three or four times daily. Furthermore, compounds or modulators for the present invention can be administered in intranasal form via topical use of suitable intranasal vehicles, or via transdermal routes, using those forms of transdermal skin patches well known to those of ordinary skill in that art. To be administered in the form of a transdermal delivery system, the dosage administration will, of course, be continuous rather than intermittent throughout the dosage regimen., For combination treatment with more than one active agent, where the active agents are in separate dosage formulations, the active agents can be administered concurrently, or they each can be administered at separately staggered times.

[0055] The dosage regimen utilizing the compounds or modulators in the present invention is selected in accordance with a variety of factors including type, species, age, weight, sex and medical condition of the patient; the severity of the condition to be treated; the route of administration; the renal and hepatic function of the patient; and the particular drug employed. A physician or veterinarian of ordinary skill can readily determine and prescribe the effective amount of the drug required to prevent, counter or arrest the progress of the condition. Optimal precision in achieving concentrations of drug within the range that yields efficacy without toxicity requires a regimen based on the kinetics of the drug's availability to target sites. This involves a consideration of the distribution, equilibrium, and elimination of a drug.

[0056] The drugs of this invention can form the active ingredient, and are typically administered in admixture with suitable pharmaceutical diluents, excipients or carriers (collectively referred to herein as “carrier” materials) suitably selected with respect to the intended form of administration, that is, oral tablets, capsules, elixirs, syrups and the like, and consistent with conventional pharmaceutical practices.

[0057] For instance, for oral administration in the form of a tablet or capsule, the active drug component can be combined with an oral, non-toxic pharmaceutically acceptable inert carrier such as ethanol, glycerol, water and the like. Moreover, when desired or necessary, suitable binders, lubricants, disintegrating agents and coloring agents can also be incorporated into the mixture. Suitable binders include, without limitation, starch, gelatin, natural sugars such as glucose or beta-lactose, corn sweeteners, natural and synthetic gums such as acacia, tragacanth or sodium alginate, carboxymethylcellulose, polyethylene glycol, waxes and the like. Lubricants used in these dosage forms include, without limitation, sodium oleate, sodium stearate, magnesium stearate, sodium benzoate, sodium acetate, sodium chloride and the like. Disintegrators include, without limitation, starch, methyl cellulose, agar, bentonite, xanthan gum and the like.

[0058] For liquid forms the active drug component can be combined in suitably flavored suspending or dispersing agents such as the synthetic and natural gums, for example, tragacanth, acacia, methyl-cellulose and the like. Other dispersing agents that may be employed include glycerin and the like. For parenteral administration, sterile suspensions and solutions are desired. Isotonic preparations, which generally contain suitable preservatives, are employed when intravenous administration is desired.

[0059] The drugs in the present invention can also be administered in the form of liposome delivery systems, such as small unilamellar vesicles, large unilamellar vesicles and multilamellar vesicles. Liposomes can be formed from a variety of phospholipids, such as cholesterol, stearylamine or phosphatidylcholines.

[0060] Drugs in the present invention may also be delivered by the use of monoclonal antibodies as individual carriers to which the compound molecules are coupled. The drugs in the present invention may also be coupled with soluble polymers as targetable drug carriers. Such polymers can include polyvinylpyrrolidone, pyran copolymer, polyhydroxypropylmethacryl-amidephenol, polyhydroxy-ethylaspartamidephenol, or polyethyl-eneoxidepolylysine substituted with palmitoyl residues. Furthermore, the drugs in the present invention may be coupled to a class of biodegradable polymers useful in achieving controlled release of a drug, for example, polylactic acid, polyepsilon caprolactone, polyhydroxy butyric acid, polyorthoesters, polyacetals, polydihydro-pyrans, polycyanoacrylates and cross-linked or amphipathic block copolymers of hydrogels.

[0061] For oral administration, the drugs may be administered in capsule, tablet, or bolus form or alternatively they can be mixed with feed. The capsules, tablets, and boluses are comprised of the active ingredient in combination with an appropriate carrier vehicle such as starch, talc, magnesium stearate, or di-calcium phosphate. These unit dosage forms are prepared by intimately mixing the active ingredient with suitable finely-powdered inert ingredients including diluents, fillers, disintegrating agents, and/or binders such that a uniform mixture is obtained. An inert ingredient is one that will not react with the drugs and which is non-toxic to the animal being treated. Suitable inert ingredients include starch, lactose, talc, magnesium stearate, vegetable gums and oils, and the like. These formulations may contain a widely variable amount of the active and inactive ingredients depending on numerous factors such as the size and type of the animal species to be treated and the type and severity of the infection. The active ingredient may also be administered by simply mixing the compound with the feedstuff or by applying the compound to the surface of the foodstuff.

[0062] The compounds or modulators may alternatively be administered parenterally via injection of a formulation consisting of the active ingredient dissolved in an inert liquid carrier. Injection may be either intramuscular, intraruminal, intratracheal, or subcutaneous. The injectable formulation consists of the active ingredient mixed with an appropriate inert liquid carrier. Acceptable liquid carriers include the vegetable oils such as peanut oil, cotton seed oil, sesame oil and the like as well as organic solvents such as solketal, glycerol formal and the like. As an alternative, aqueous parenteral formulations may also be used. The vegetable oils are the preferred liquid carriers. The formulations are prepared by dissolving or suspending the active ingredient in the liquid carrier such that the final formulation contains from 0.005 to 10% by weight of the active ingredient.

[0063] The invention is further illustrated by the following nonlimiting examples.

### EXAMPLE 1

### Cell Culture

[0064] The AML-like cell lines HL-60 (promyelocytic) and U-937 (promonocytic) were obtained from the ATCC. AML-193 (monocytic) and THP-1 (monocytic) cells were obtained from the RW Johnson Pharmaceutical Research Center, San Diego. Cells were grown in Roswell Park Memorial Institute medium (RPMI) with 20% Fetal Bovine Serum (FBS). AML-193 was also supplemented with granulocyte-macrophage colony-stimulating factor (GM-CSF) (10 ng/ml), insulin (0.005 mg/ml), and transferrin (0.005 mg/ml).

### EXAMPLE 2

### Toxic Dose Assay

[0065] The cells of Example 1 were inoculated into 6-well plates at an initial concentration of 1×10⁵ cells/ml. (B)-6-[amino(4-chlorophenyl)(1-methyl-i 1H-imidazol-5-yl)methyl]-4(3-chlorophenyl)-1-methyl-2(1H)-quinolinone) was added at concentrations ranging form 0.5 to 500 nM in 3 μl of DMSO directly to the culture medium. Control cells from Example 1 were grown in medium alone or in medium supplemented with vehicle (0.1% DMSO). Cell numbers were counted at days four and seven in a hemocytometer and cell viability was determined by trypan blue exclusion assay. The IC₅₀ was defined as the dose at which the number of viable cells in the treated sample was 50% of that in the control at day seven. Calculations were made based on duplicate runs of the experiment. The IC₅₀ of the four cell lines was calculated after seven days of treatment with the FTI. AML-193 had an IC₅₀ of 134 nM, HL-60 had an IC₅₀ of 24 nM, THP-1 had an IC₅₀ of 19 nM, and U-937 had an IC₅₀ of 44 nM. This indicated that the four AML-like cell lines were sensitive to FTI treatement.

### EXAMPLE 3

### Time Course Assay

[0066] Duplicate cultures of the cells of Example 1 were inoculated into 6-well plates at an initial concentration of 1×10⁵ cells/ml. (B)-6-[amino(4-chlorophenyl)(1-methyl-1H-imidazol-5-yl)methyl]-4-(3-chlorophenyl)-1-methyl-2(1H)-quinolinone) was supplemented at a concentration of 100 nM in 3 μl of DMSO directly to the culture medium. The concentration of 100 nM was chosen for the subsequent time course experiments to normalize the treatment protocol based, in part, on the results of Example 2. Duplicate control cultures were grown in medium containing 0.1% DMSO. Duplicate cultures were harvested daily for a total of six days. Cells were counted, assayed for viability, and total RNA isolated according to the manufacturer's protocol (Qiagen RNeasy). The analysis showed that cells from different cell lines were effected at different times. RNA was treated with DNase1 (Qiagen DNase1 kit) to remove any residual genomic DNA. Linear amplification of RNA was conducted according to the procedure described in U.S. Pat. No. 5,545,522 to Van Gelder et. al. Aliquots of 5 μg of aRNA were then prepared for hybridization to cDNA arrays.

### EXAMPLE 4

### Bone Marrow Processing

[0067] Bone marrow aspirates were obtained from two patients diagnosed with AML who had been treated with FTI. These AML patients were administered 600 mg (B)-6[amino(4-chlorophenyl)(1-methyl-1H-imidazol-5-yl)methyl]-4-(3-chlorophenyl)-1 methyl-2(1H)-quinolinone) twice daily over a 21 day period. Bone marrow aspirates were taken at baseline and once a week for the three weeks of treatment. One of these patients did not respond (RH) while the other responded (BS) to the FTI. Response was determined as a reduction of more than 50% of blast cells in bone marrow aspirates. The aspirates were diluted to 15 ml with PBS and Ficoll-density centrifuged. White blood cells were washed twice with PBS, resuspended in FBS with 10% DMSO and immediately frozen at −80° C. Cells were cryogenically preserved to maintain cell viability. Samples were thawed at 37° C. and 10× volume of RPMI with 20% FBS was added drop-wise over a period of 5 min. Cells were centrifuged at 1600 rpm for 10 min and resuspended in 10 ml PBS with 2 mM EDTA and 0.5% BSA. Samples were then passed through a 70 μM filter to remove any cell clumps. Cell viability was determined by Trypan Blue assay. If sample viability was less than 50% a Miltenyi Dead Cell Removal Kit was employed to enrich for the live cell fraction. 2×10⁵ viable cells were then double labeled with CD33-FITC and CD34-PE antibodies (Pharminigen) and FACS analysis was performed. Post (B)-6-[amino(4-chlorophenyl)(1-methyl-1H-imidazol-5-yl)methyl]-4-(3-chlorophenyl)-1-methyl-2(1H)-quinolinone)-treated bone marrow samples were enriched for leukemic cells by magnetic bead cell separation using either CD33 or CD34 antibodies (Miltenyi). The extracted cells had RNA extracted as described in Example 3.

### EXAMPLE 5

### Probe Preparation

[0068] RNA samples obtained in Examples 3 and 4 were prepared for hybridization to cDNA microarrays according to the following procedure. One to two rounds of linear amplification was performed on total RNA depending on the amount of starting material. Initially, 1-10 μg total RNA was reverse transcribed using the Superscript cDNA transcription kit (Gibco BRL). Ten μl total RNA was first mixed with 1 μl of 0.5 mg/ml T7-oligodT primer, incubated at 70° C. for 10 min, and then chilled on ice. Next, 8 μl of 5×first-strand reaction buffer, 0.1M DTT, 10 mM dNTPs, and 1 μl Rnase Block were added, and the solution incubated at 42° C. for 5 min. One μl Superscript II was then added and the reaction was incubated at 42° C. for 2 hr. The reaction was heat deactivted at 70° C. for 10 min and 1 μl was removed for PCR. Next, 92 μl Rnase-free water, 30 μl 5×second-strand reaction buffer, 3 μl 10 mM dNTP, 4 μl DNA polymerase 1, 1 μl E. Coli Rnase H, 1 μl E. Coli DNA ligase were added and the mixture incubated at 16° C. for 2 hr. cDNA was linear amplified using the Ampliscribe T7-transcription kit (Epicenter). If required, a second round of RNA amplification was performed by the random hexamer approach. Fluorescently labeled cDNA probes were synthesized by priming aRNA with random hexamers and including Cy3-dCTP in the nucleotide mix. Reactions were purified using a QIAquick PCR purification kit (Qiagen), the volumes of probe normalized using relative fluoresence (Cytofluor), and resuspended in 50 μl of Version 2 hybridization buffer (Amersham Pharmacia Biotech, Pistcataway, N.J.) with 50% formamide and human Cot1 DNA (Life Technologies).

### EXAMPLE 6

### Array Hybridization and Analysis

[0069] The arrays contained 7452 cDNAs from the IMAGE consortium (Integrated Molecular Analysis of Genome and their Expression: Research Genetics, Huntsville, Ala.) and Incyte libraries. Micro-arrays were generated as follows and probes hybridized as described in Example 5. cDNAs were printed on amino silane-coated slides (Corning) with a Generation III Micro-array Spotter (Molecular Dynamics). The cDNAs were PCR amplified, purified (Qiagen PCR purification kit), and mixed 1:1 with 10 M NaSCN printing buffer. Prior to hybridization micro-arrays were incubated in isopropanol at room temperature for 10 min. The probes were incubated at 95° C. for 2 min, at room temperature for 5 min, and then applied to three replicate slides. Cover slips were sealed onto the slides with DPX (Fluka) and incubated at 42° C. overnight. Slides were then washed at 55° C. for 5 min in 1×SSC/0.2% SDS and 0.1×SSC/0.2% SDS, dipped in 0.1×SSC and dried before being scanned by a GenIII Array Scanner (Molecular Dynamics). The fluorescence intensity for each spot was analyzed with AUTOGENE software (Biodiscovery, Los Angeles).

[0070] The intensity level of each micro-array was normalized so that the 75^{th} percentile of the expression levels was equal across micro-arrays. Clones displaying a coefficient of variance (CV) greater than 50% of the mean were excluded from the analysis. Since background intensity was a maximum of 32 units for all experiments a threshold of 32 was assigned to all clones exhibiting an expression level lower than this. A ratio matrix was then generated based on pair-wise analysis of treated and control samples and Hierarchical clustering was performed using an euclidean metric and average linkage (Omniviz Pro™).

[0071] Each sample was hybridized to three identical arrays and the mean signal intensity was compared by scatter-plot analysis. High correlation coefficients were also observed when control samples were compared to treated samples from the same day. This indicated there were no gross changes in gene expression due to treatment with (B)-6-[amino(4-chlorophenyl)(1-methyl-1H-imidazol-5-yl)methyl]-4-(3-chlorophenyl)-1-methyl-2(1H)-quinolinone). In addition, the variation between control samples from different days was examined. Cells were mock-treated and RNA was isolated after 1, 2, 3, 4, 5, and 6 days. Following labeling and hybridization the mean intensity of duplicate samples and the coefficient of variance (CV) of each clone (3 spots per clone) were calculated. Data points which displayed a CV of more than 50% were discarded from further analysis.

### EXAMPLE 7

### Differential Gene Expression in Treated Cell Line Samples

[0072] Hierarchical clustering was performed on the time-course data sets using the OmniViz Pro™ software (Battelle). Initially, fold-changes of 1.5, 1.7, and 2.0 were used as filters for the treated versus control intensity ratios for each day of the time-course. The gene expression profiles of genes modulated beyond these thresholds were analyzed to examine those genes that were commonly modulated between the three data sets and identify gene clusters that shared similar expression profiles. Results are shown in Tables 1-3 below.

[0073] Genes analyzed according to this invention are identified in the tables below by reference to Gene ID Numbers (internally generated) and accession numbers in the Genbank database where such genes have been entered in the Genbank database. The attached sequence listing, incorporated herein by reference, shows sequences corresponding to the Gene ID Number and are named with those Gene ID Numbers. In some cases, the listed sequences are to full length nucleic acid sequences that code for the production of a protein or peptide. One skilled in the art will recognize that identification of full-length sequences is not necessary from an analytical point of view. That is, portions of the sequences or ESTs can be selected according to well-known principles for which probes can be designed to assess gene expression for the corresponding gene. Further, it should be noted that some of the sequences in the listing contain the letter “N” in place of a nucleotide designation. One skilled in the art will recognize that the “N” indicates placement of any nucleotide in that portion of the sequence.

### EXAMPLE 8

### Identification of Gene Networks

[0074] Genes that were regulated in two or more cell lines by at least 1.5-fold in drug treated cell lines (Table 1) were identified as described above. The list of these genes was employed to identify major gene pathways that were being modulated by the most preferred FTI, (B)-6-[amino(4-chlorophenyl)(1-methyl-1H-imidazol-5-yl)methyl]-4-(3-chlorophenyl)-1-methyl-2(1H)-quinolinone). If clones did not perfectly match a known gene annotations from the best BLAST result of the clone sequence were used. Since the level of regulation of these genes varied over the course of treatment of the cell lines, the gene expression profiles from the primary AML tissue that responded to this FTI were determined.

[0075] It was found that many genes in the MAPK/ERK (FIG. 2) signaling pathways were being down-regulated and that genes in the TGFβ (FIG. 3) and WNT (FIG. 3) signaling pathways were generally up-regulated, while apoptotic pathways were also activated (FIG. 4). This allowed the identification of other gene targets sensitive to treatment with known or novel drug compounds. For example, beneficial treatment can result from FTIs used in conjunction with tyrosine kinase, MEK kinase, PI3K and/or MAP kinase inhibitors to obtain a more potent effect. In addition, given the finding that apoptotic pathways are activated in FTI treated cells, drugs that modulate apoptosis could be expected to have beneficial effect when employed in conjunction with an FTI. Examples of these types of compounds include tyrosine kinase inhibitors (eg Gleevec, Novartis), MAP kinase inhibitors (eg U-0126, PD-098059, SB-203580), and inhibitors of anti-apoptotic genes such as Bcl-XL (eg antisense, ribozymes, DNAzymes).

TABLE 1
Genes (by Genbank Accession Number) modulated at least 1.5 fold
in 2 or more of the cell lines over the 6 day time course.

| Gene ID | Accession No. |
|---|---|
| 3434105F7 | AB026898 |
| 3881595H1 | AC000134 |
| AI939481 | AC005155 |
| AA961061 | AC005670 |
| 3918104H1 | AC006023 |
| AI025519 | AC008427 |
| 5543360F8 | AC009220 |
| AA744682 | AC009289 |
| AA932129 | AC009756 |
| AI148008 | AC011473 |
| Y00052 | AC013722 |
| R52476 | AC021078 |
| AA864819 | AC022087 |
| AI815593 | AC022150 |
| AI141943 | AC026448 |
| AI300541 | AC073585 |
| 2515486H1 | AF161372 |
| 1731618H1 | AJ003147 |
| BE222911 | AJ400879 |
| R13802 | AK022901 |
| AI656222 | AL021155 |
| AI553823 | AL022313 |
| AA010251 | AL034397 |
| AA237071 | AL035420 |
| 2445101F6 | AL049824 |
| AI638342 | AL122004 |
| AA779424 | AL136980 |
| H81171 | AL137073 |
| R77754 | AL137790 |
| AI209040 | AL139082 |
| 6421806H1 | AL139396 |
| H61066 | AL161787 |
| R59209 | AL355136 |
| AA486141 | AL355352 |
| AI339252 | AP001630 |
| AW023438 | BC009732 |
| 914979H1 | BC013834 |
| AA455969 | D00015 |
| T64335 | D00017 |
| X02308 | D00596 |
| X67098 | D00596 |
| X01023 | D10493 |
| D10493 | D10493 |
| Y00396 | D10493 |
| X69292 | D10667 |
| AA736561 | D11094 |
| S68252 | D11139 |
| M25315 | D12592 |
| AI186110 | D13118 |
| H84153 | D13639 |
| AA598561 | D14043 |
| D14695 | D14695 |
| 2206642T6 | D16889 |
| AI878943 | D17004 |
| U38846 | D17080 |
| J03801 | D21235 |
| AI762926 | D23660 |
| D25215 | D25215 |
| U41078 | D26512 |
| AA485961 | D30648 |
| AA456408 | D38441 |
| AI311090 | D38616 |
| 1869911H1 | D42084 |
| D43950 | D43950 |
| AW006368 | D44467 |
| U29092 | D45050 |
| D45887 | D45887 |
| W68193 | D49489 |
| 3633286H1 | D63874 |
| N76967 | D66904 |
| AA985407 | D82326 |
| AI962797 | D83260 |
| M59829 | D85730 |
| 3107995H1 | D86322 |
| AA279906 | D86550 |
| AI016874 | D86586 |
| 556963H1 | D86955 |
| AI810687 | D86997 |
| AF045581 | D87462 |
| U41070 | D89078 |
| D90209 | D90209 |
| AA812265 | D90767 |
| 2135769H1 | J02763 |
| 1876511H1 | J03072 |
| J04088 | J04088 |
| AI590075 | J04973 |
| H30357 | J05451 |
| K00558 | K03460 |
| L10413 | L00634 |
| L01087 | L01087 |
| AI027898 | L02426 |
| L06139 | L06139 |
| U28936 | L07914 |
| M86400 | L07955 |
| AA428915 | L08634 |
| AA464627 | L09604 |
| M94859 | L10284 |
| R78541 | L10717 |
| L15189 | L11066 |
| L11284 | L11284 |
| T87908 | L12387 |
| T80827 | L13802 |
| L08044 | L15203 |
| AI278029 | L16862 |
| M60278 | L17032 |
| M60278 | L17032 |
| M65128 | L18980 |
| W49672 | L20861 |
| L22005 | L22005 |
| AI380522 | L23822 |
| AA988469 | L25591 |
| L26336 | L26336 |
| AI074564 | L32866 |
| M63175 | L35233 |
| 2470939H1 | L35848 |
| AA190648 | L36055 |
| AI243166 | L38716 |
| L39833 | L39833 |
| M97347 | L41415 |
| 2005142H1 | L42324 |
| M11723 | L43615 |
| U04045 | L47574 |
| AA284067 | L76938 |
| M13142 | M13142 |
| W68291 | M15395 |
| 5560880H1 | M19483 |
| 3171275H1 | M20199 |
| M22489 | M22489 |
| AA070627 | M22810 |
| H39560 | M24736 |
| M25897 | M25897 |
| M27492 | M27492 |
| AA570304 | M29366 |
| 205581R6 | M29696 |
| M84739 | M32294 |
| M84739 | M32294 |
| M35857 | M32315 |
| 3801801H1 | M33680 |
| M63904 | M63904 |
| AI091579 | M63971 |
| M69215 | M69215 |
| M74782 | M74782 |
| M80254 | M80254 |
| M80647 | M80647 |
| M84526 | M84526 |
| 6805226H1 | M84526 |
| S93414 | M86553 |
| M91556 | M91556 |
| M95678 | M95678 |
| 2017923F6 | M96326 |
| H73054 | NM_000551 |
| AA488324 | NM_001211 |
| N73242 | NM_001274 |
| AF013611 | NM_001335 |
| AW163686 | NM_001524 |
| AI921879 | NM_002287 |
| AI652785 | NM_002333 |
| AI423526 | NM_003332 |
| 3028719F6 | NM_003600 |
| AB010882 | NM_003601 |
| AF030424 | NM_003642 |
| AW194791 | NM_003668 |
| AF075599 | NM_003969 |
| AF031141 | NM_004223 |
| 2676931T6 | NM_004412 |
| AF053304 | NM_004725 |
| AF119815 | NM_004885 |
| AI816398 | NM_004888 |
| 2185556H1 | NM_004917 |
| 3357511H1 | NM_004917 |
| AA047585 | NM_005109 |
| AA448972 | NM_005592 |
| AW629084 | NM_005817 |
| AJ001015 | NM_005854 |
| AJ001016 | NM_005856 |
| U85055 | NM_006480 |
| 3618886F6 | NM_006536 |
| AA906714 | NM_006573 |
| AF060153 | NM_007037 |
| 1467864F6 | NM_012089 |
| AI097079 | NM_012100 |
| AF204944 | NM_012105 |
| W44673 | NM_012428 |
| AI522316 | NM_013386 |
| AI700673 | NM_013439 |
| AA057781 | NM_014172 |
| AI299795 | NM_014251 |
| 1931159F6 | NM_014397 |
| AW630208 | NM_014413 |
| 2821685T6 | NM_014967 |
| 1539060H1 | NM_015343 |
| AI762738 | NM_015449 |
| AA401397 | NM_015596 |
| AW243944 | NM_015596 |
| AI436551 | NM_016141 |
| AI651159 | NM_016440 |
| AA527334 | NM_016625 |
| g922698 | NM_017555 |
| 1693028H1 | NM_017636 |
| 002783H1 | NM_017860 |
| AI368583 | NM_017874 |
| AW170305 | NM_017903 |
| H62827 | NM_018321 |
| M78706 | NM_019020 |
| BE048230 | NM_020216 |
| AI214466 | NM_020334 |
| AA452802 | NM_021196 |
| AI808824 | NM_022082 |
| W77977 | NM_022336 |
| AA535015 | NM_022570 |
| AA861140 | NM_022829 |
| AW078834 | NM_023080 |
| 5122087H1 | NM_024056 |
| AF017182 | NM_024101 |
| AA449040 | NM_024116 |
| 2792728F6 | NM_024902 |
| BE218593 | NM_025230 |
| AA669885 | NM_030763 |
| AI339565 | NM_030908 |
| AF038564 | NM_031483 |
| AI126706 | NM_032038 |
| 1961084H1 | NM_032188 |
| 4609810F6 | NM_032554 |
| AA745592 | NM_032844 |
| AW612141 | NM_033050 |
| AI740538 | NM_033280 |
| U58522 | S51016 |
| M57703 | S63697 |
| AA873257 | S73591 |
| AA521213 | S77359 |
| N77754 | S79873 |
| AA984230 | S80071 |
| R79935 | S81439 |
| T71391 | T71391 |
| AA598776 | U05340 |
| U11053 | U11053 |
| T55353 | U12597 |
| AA456616 | U14970 |
| U18300 | U18300 |
| AF017306 | U20657 |
| AA459663 | U25182 |
| U27699 | U27699 |
| AI884916 | U29171 |
| U29171 | U29171 |
| 1671033F6 | U33429 |
| AA017042 | U40989 |
| AI126520 | U48405 |
| U48807 | U48807 |
| U49395 | U49395 |
| AA186542 | U50078 |
| U51586 | U51586 |
| AW150605 | U54558 |
| AA455800 | U55206 |
| AF029777 | U57316 |
| I19355 | U58913 |
| 319095H1 | U58913 |
| AF027964 | U59911 |
| U60519 | U60519 |
| AI371158 | U65378 |
| U69883 | U69883 |
| H30148 | U73641 |
| R80718 | U75283 |
| U77180 | U77180 |
| U78180 | U78180 |
| U83115 | U83115 |
| AA938905 | U86218 |
| AI401546 | U88844 |
| 2526581H1 | U90904 |
| AA773114 | U95740 |
| AA176596 | U96781 |
| X13274 | V00543 |
| I16618 | V00595 |
| R91899 | X00226 |
| AW519155 | X00318 |
| X87344 | X00369 |
| X02910 | X01394 |
| M15840 | X02532 |
| AA401046 | X02592 |
| X02812 | X02812 |
| X87344 | X03066 |
| X03084 | X03084 |
| M10901 | X03225 |
| X03225 | X03225 |
| R81823 | X03742 |
| X04011 | X04011 |
| K02400 | X04076 |
| X07036 | X04408 |
| X07036 | X04408 |
| Y00816 | X05309 |
| N20475 | X05344 |
| M11233 | X05344 |
| X02544 | X05784 |
| X52192 | X06292 |
| R33755 | X06547 |
| X06989 | X06989 |
| X07979 | X07979 |
| X14723 | X08004 |
| M20566 | X12830 |
| M20566 | X12830 |
| X13197 | X13197 |
| M21304 | X13709 |
| X00351 | X13839 |
| X60236 | X14008 |
| H57180 | X14034 |
| M33011 | X14758 |
| X14768 | X14768 |
| M31625 | X14768 |
| M31626 | X14768 |
| M30816 | X14768 |
| X52882 | X14983 |
| AA598758 | X15187 |
| X15606 | X15606 |
| K03515 | X16539 |
| AA868186 | X17093 |
| X51416 | X51416 |
| M23699 | X51439 |
| AA455222 | X51675 |
| X51757 | X51757 |
| X52195 | X52195 |
| U06434 | X53682 |
| J03198 | X54048 |
| M32304 | X54533 |
| AA487812 | X56134 |
| X56134 | X56134 |
| M16985 | X56257 |
| N31660 | X56257 |
| H27379 | X57198 |
| X57522 | X57522 |
| X57830 | X57830 |
| M57765 | X58377 |
| X58528 | X58528 |
| M81182 | X58528 |
| S60489 | X60111 |
| AI739095 | X61157 |
| R76314 | X61587 |
| M83665 | X62534 |
| X65921 | X65921 |
| M37722 | X66945 |
| AA453816 | X69516 |
| AA187162 | X69654 |
| X69819 | X69711 |
| X70070 | X70070 |
| X70697 | X70697 |
| S40706 | X71427 |
| T53775 | X71874 |
| X71877 | X71877 |
| X73458 | X73458 |
| X74801 | X74801 |
| AA454585 | X75755 |
| R43734 | X76939 |
| AI189206 | X77303 |
| 2496221H1 | X77303 |
| H17504 | X80692 |
| R26434 | X80910 |
| X83688 | X83688 |
| U24231 | X84709 |
| 3576337H1 | X85030 |
| X87212 | X87212 |
| T56477 | X87212 |
| AA464034 | X89401 |
| X89576 | X89576 |
| AA187458 | X92396 |
| M15887 | X94565 |
| X94991 | X94991 |
| X96427 | X96427 |
| X97058 | X97058 |
| AA425120 | X98262 |
| 3283686H1 | XM_005825 |
| AW027188 | XM_005958 |
| 1525902F6 | XM_006646 |
| R48796 | XM_008099 |
| AK000599 | XM_027140 |
| AA044653 | XM_031608 |
| AW665954 | XM_035574 |
| H86407 | XM_037453 |
| R00285 | XM_038150 |
| X57447 | XM_039395 |
| 778372H1 | XM_040459 |
| R82530 | XM_041024 |
| AI580830 | XM_042041 |
| 3097063H1 | XM_044784 |
| 3038910H1 | XM_046691 |
| H53340 | XM_048213 |
| 1654210F6 | XM_048530 |
| L42856 | XM_054964 |
| 2707270F6 | XM_056259 |
| M23468 | Y00062 |
| Y00649 | Y00649 |
| Y00757 | Y00757 |
| M17017 | Y00787 |
| M28130 | Y00787 |
| L02932 | Y07619 |
| Y10256 | Y10256 |
| AA454813 | Y12395 |
| AA149850 | Y12670 |
| 704183H1 | Y13710 |
| 059476H1 | Y13829 |
| Y13834 | Y13834 |
| L11016 | Y14768 |
| 3141315H1 | Y17803 |
| AI341167 | Y18391 |
| AI707852 | Z12962 |
| U51278 | Z23115 |
| AI686653 | Z26876 |
| AA043102 | Z35102 |
| AA136533 | Z35481 |
| U49083 | Z49148 |
| R70234 | Z56852 |
| 257274R6 | Z58168 |
| U62027 | Z73157 |
| 391237F1 | Z73157 |
| 510997F1 | Z73157 |
| AI808621 | Z82214 |
| AA460801 | Z98749 |
| 2673259F6 | Z98752 |
| R22977 | Z98946 |
| L03380 | Z99995 |
| AA425422 | |
| AA460392 | |
| AA508510 | |
| AA552028 | |
| AA576785 | |
| AA663307 | |
| AI015248 | |
| AI024468 | |
| AI086865 | |
| AI190605 | |
| AI203269 | |
| AI264420 | |
| AI333013 | |
| AI435052 | |
| AI671268 | |
| AI796718 | |
| AI990816 | |
| AW027164 | |
| AW167520 | |
| H24679 | |
| H66015 | |
| H91370 | |
| W07570 | |
| 1274737F6 | |
| 195337H1 | |
| 2398102H1 | |
| 2531082H1 | |
| 264639H1 | |
| 2794246F6 | |
| 3290073H1 | |
| 335737H1 | |
| 4539942F8 | |
| 6300669H1 | |
| 938765H1 | |

[0076] TABLE 2
Genes (by GenBank Accession Number) modulated
at least 1.7 fold in primary AML Sample.

| Gene ID | Accession No. |
|---|---|
| T94331 | AB026898 |
| 3881595H1 | AC000134 |
| 1329021F6 | AC002073 |
| 2858615H1 | AC002325 |
| AI791539 | AC002428 |
| AI821217 | AC004258 |
| AA774798 | AC004671 |
| H29666 | AC004845 |
| T95173 | AC005071 |
| AA814523 | AC005160 |
| 5905620T9 | AC005212 |
| 5986963H1 | AC005280 |
| 5825251H1 | AC005306 |
| N36113 | AC005670 |
| 1700438H1 | AC005682 |
| R48756 | AC005757 |
| 5538589F6 | AC005839 |
| 3918104H1 | AC006023 |
| AA443719 | AC007240 |
| AI867297 | AC007883 |
| R63067 | AC008073 |
| AW022174 | AC008382 |
| 5537789F6 | AC008525 |
| H00249 | AC008733 |
| 1436240H1 | AC008860 |
| 2668191F6 | AC008949 |
| 5543360F8 | AC009220 |
| AA737674 | AC009892 |
| 5104579H1 | AC009892 |
| 3335217F6 | AC010311 |
| BE326380 | AC010521 |
| 3746214H1 | AC011088 |
| 1671315F6 | AC011500 |
| H60969 | AC012351 |
| AA926944 | AC012377 |
| 3100089H1 | AC012454 |
| Y00052 | AC013722 |
| R52476 | AC021078 |
| N45149 | AC021106 |
| AI742120 | AC022137 |
| 4177228F6 | AC022224 |
| 2676312H1 | AC022415 |
| H73476 | AC022740 |
| AA652121 | AC046170 |
| AI308320 | AC046170 |
| 1956982H1 | AC046170 |
| 1428534F6 | AC051619 |
| 2914934H1 | AC055707 |
| AA621370 | AC064807 |
| 5514511R6 | AC073333 |
| AI698737 | AC074331 |
| 3406131H1 | AC079118 |
| N20072 | AC096579 |
| 5911413H1 | AC096667 |
| AI458182 | AF042782 |
| 2291436H1 | AF074333 |
| W32067 | AF136745 |
| 6755801J1 | AF157623 |
| 2397317F6 | AF235100 |
| R53190 | AF384819 |
| 1731618H1 | AJ003147 |
| 2959801H1 | AJ003147 |
| 3123232H1 | AJ003147 |
| 2760110H1 | AJ006345 |
| X64073 | AJ239325 |
| 3986782F7 | AJ249275 |
| AI366098 | AJ276674 |
| AI695385 | AJ289236 |
| BE222911 | AJ400879 |
| AI400473 | AK017738 |
| AI299633 | AK021499 |
| R13802 | AK022901 |
| 1489075H1 | AK025775 |
| AI656222 | AL021155 |
| W96144 | AL021155 |
| 2459540H1 | AL031282 |
| 3461693F6 | AL031588 |
| 4333034H1 | AL031726 |
| 3332309H1 | AL031728 |
| R61661 | AL032821 |
| U71321 | AL033519 |
| AA935151 | AL034374 |
| AA010251 | AL034397 |
| U43431 | AL035367 |
| AA237071 | AL035420 |
| AA609779 | AL049610 |
| AA167461 | AL049612 |
| 4228729H2 | AL049742 |
| 6712339H1 | AL049766 |
| AI051176 | AL049872 |
| 1747028H1 | AL078600 |
| 5164454H1 | AL109840 |
| 7007735H1 | AL117382 |
| AA526337 | AL121601 |
| AI638342 | AL122004 |
| 4835576H1 | AL122035 |
| W01596 | AL133243 |
| U64205 | AL133367 |
| 4820983H1 | AL135786 |
| 5594552H1 | AL136381 |
| H12102 | AL136979 |
| H81171 | AL137073 |
| AA151374 | AL137790 |
| AA578089 | AL138787 |
| AI209040 | AL139082 |
| 6421806H1 | AL139396 |
| H60498 | AL157776 |
| 3721604H1 | AL160271 |
| H61066 | AL161787 |
| 2798009H1 | AL162252 |
| 2225447F6 | AL162430 |
| AI885557 | AL162729 |
| 2918417F6 | AL163279 |
| AA489975 | AL355151 |
| U77456 | AL355794 |
| 5375277T9 | AL356266 |
| AI051860 | AL356489 |
| 4019605F6 | AL356489 |
| U29607 | AL356801 |
| AA861429 | AL359512 |
| AA767859 | AL359915 |
| 1362587H1 | AL391122 |
| R09122 | AL391194 |
| R93094 | AP000173 |
| AA954331 | AP000432 |
| R10535 | AP000555 |
| 5327443H1 | AP000936 |
| 1569726H1 | AP001347 |
| R92422 | AP001672 |
| 3422674H1 | AP002800 |
| AI310451 | AP002812 |
| 3568042H1 | AP003900 |
| AA455969 | D00015 |
| AF030575 | D00015 |
| T64335 | D00017 |
| D12614 | D00102 |
| X67098 | D00596 |
| R27585 | D00759 |
| AA465593 | D00762 |
| M80436 | D10202 |
| M80436 | D10202 |
| M80436 | D10202 |
| M80436 | D10202 |
| AA464600 | D10493 |
| AI147046 | D10653 |
| S68252 | D11139 |
| M25315 | D12592 |
| AI186110 | D13118 |
| S57708 | D13515 |
| D13626 | D13626 |
| AA682625 | D13641 |
| AA598561 | D14043 |
| D14695 | D14695 |
| D14825 | D14825 |
| 855326R1 | D16234 |
| L20046 | D16305 |
| V00496 | D17206 |
| AA629808 | D17554 |
| M57285 | D21214 |
| J03801 | D21235 |
| AI700360 | D21878 |
| D25216 | D25216 |
| U41078 | D26512 |
| AF245447 | D28468 |
| AF245447 | D28468 |
| AA070997 | D29012 |
| 2134847H1 | D30756 |
| AI147295 | D30756 |
| AA455067 | D31839 |
| AI311090 | D38616 |
| AW629690 | D42084 |
| 1869911H1 | D42084 |
| 5122374H1 | D43701 |
| D43950 | D43950 |
| D45887 | D45887 |
| W68193 | D49489 |
| X72498 | D50326 |
| L11667 | D63861 |
| D63874 | D63874 |
| 3633286H1 | D63874 |
| X61598 | D83174 |
| AA279906 | D86550 |
| AA729988 | D86550 |
| D86956 | D86956 |
| L36719 | D87116 |
| D89078 | D89078 |
| U41070 | D89078 |
| AI821897 | D89675 |
| D90209 | D90209 |
| 2135769H1 | J02763 |
| J03040 | J03040 |
| 1876511H1 | J03072 |
| J03258 | J03258 |
| J03571 | J03571 |
| J04111 | J04111 |
| AI125073 | J04132 |
| 1634342H1 | J04794 |
| H30357 | J05451 |
| K02054 | K02054 |
| X02415 | K02569 |
| K03000 | K03000 |
| H58873 | K03195 |
| AI791949 | K03474 |
| L10413 | L00634 |
| H22919 | L03558 |
| L04288 | L04288 |
| AA405769 | L05144 |
| H62473 | L07594 |
| L08177 | L08177 |
| L08177 | L08177 |
| AA234897 | L08895 |
| AA464627 | L09604 |
| M94859 | L10284 |
| R78541 | L10717 |
| L15189 | L11066 |
| M15400 | L11910 |
| L12168 | L12168 |
| L12350 | L12350 |
| L12350 | L12350 |
| T87908 | L12387 |
| L09600 | L13974 |
| M14221 | L16510 |
| M60278 | L17032 |
| M60278 | L17032 |
| M60278 | L17032 |
| M60278 | L17032 |
| 2745317H1 | L17411 |
| M65128 | L18980 |
| W49672 | L20861 |
| AI380522 | L23822 |
| AA988469 | L25591 |
| NM_001168 | L26245 |
| R20939 | L31848 |
| 2470939H1 | L35848 |
| AA442810 | L36034 |
| L36148 | L36148 |
| M11723 | L43615 |
| M14745 | M14745 |
| W68291 | M15395 |
| M16038 | M16038 |
| 339598H1 | M16038 |
| M17783 | M17783 |
| 3171275H1 | M20199 |
| 5189380H1 | M21121 |
| 4130807F7 | M22440 |
| M22612 | M22612 |
| AA070627 | M22810 |
| 1445982H1 | M23254 |
| M28638 | M24906 |
| R45525 | M28215 |
| AI051962 | M28983 |
| 736837R6 | M29696 |
| M29870 | M29870 |
| AI264247 | M30309 |
| 1512407F6 | M30310 |
| M30471 | M30471 |
| M30704 | M30703 |
| AW467649 | M31158 |
| M84739 | M32294 |
| M84739 | M32294 |
| U52165 | M32315 |
| M35857 | M32315 |
| 5077322H1 | M32315 |
| N72918 | M34175 |
| M63193 | M58602 |
| M59465 | M59465 |
| 2294719H1 | M60858 |
| 2992331H1 | M63005 |
| AA069596 | M63582 |
| M63904 | M63904 |
| AI091579 | M63971 |
| M74782 | M74782 |
| AA410680 | M77016 |
| M80647 | M80647 |
| M84526 | M84526 |
| S93414 | M86553 |
| AI310138 | M91463 |
| M95678 | M95678 |
| 2017923F6 | M96326 |
| R60624 | NM_000702 |
| AA488324 | NM_001211 |
| AA488341 | NM_001336 |
| AF006823 | NM_002246 |
| 1322305T6 | NM_002250 |
| AI921879 | NM_002287 |
| AW129770 | NM_002349 |
| AJ004977 | NM_002873 |
| AI423526 | NM_003332 |
| 4516963H1 | NM_003576 |
| 3028719F6 | NM_003600 |
| AB010882 | NM_003601 |
| AF030424 | NM_003642 |
| AF029899 | NM_003814 |
| AF055993 | NM_003864 |
| AI220935 | NM_004142 |
| AW665782 | NM_004142 |
| AI191941 | NM_004226 |
| 1392516T6 | NM_004621 |
| AA449579 | NM_004769 |
| 1810447H1 | NM_004917 |
| AA047585 | NM_005109 |
| 4181072F6 | NM_005468 |
| AA448972 | NM_005592 |
| AA742351 | NM_005739 |
| 3406436F6 | NM_005845 |
| AJ001015 | NM_005854 |
| 3118530H1 | NM_005880 |
| AA906714 | NM_006573 |
| AI016020 | NM_006672 |
| AW770551 | NM_006770 |
| AW009940 | NM_006871 |
| 864164H1 | NM_007194 |
| 1467864F6 | NM_012089 |
| AF204944 | NM_012105 |
| W23427 | NM_012115 |
| 3363678H2 | NM_012226 |
| AI652076 | NM_012243 |
| 346874T6 | NM_013308 |
| AI522316 | NM_013386 |
| AI338030 | NM_013439 |
| AI700673 | NM_013439 |
| 4540025H1 | NM_014322 |
| W00842 | NM_014331 |
| AW511388 | NM_014358 |
| AW630208 | NM_014413 |
| H63640 | NM_014834 |
| AI743175 | NM_014959 |
| 2821685T6 | NM_014967 |
| W38474 | NM_015542 |
| AW243944 | NM_015596 |
| W07181 | NM_015701 |
| 2997457H1 | NM_015938 |
| AA631149 | NM_016205 |
| AA527334 | NM_016625 |
| 5543749F6 | NM_017414 |
| AW170305 | NM_017903 |
| AA160974 | NM_018155 |
| AA625433 | NM_018404 |
| AA074666 | NM_018834 |
| 767295H1 | NM_018983 |
| M78706 | NM_019020 |
| AF245447 | NM_020126 |
| AF245447 | NM_020126 |
| 4294821H1 | NM_020344 |
| 2490994H1 | NM_021624 |
| 3556218H1 | NM_021634 |
| 2435705R6 | NM_022048 |
| 3092423H1 | NM_022054 |
| W77977 | NM_022336 |
| AA429219 | NM_023930 |
| 1001514R6 | NM_024022 |
| AI031531 | NM_024083 |
| AA449040 | NM_024116 |
| 2803571H1 | NM_024586 |
| 1390130H1 | NM_024671 |
| 3241088H1 | NM_024850 |
| H96170 | NM_030779 |
| 1540906H1 | NM_030779 |
| AI824146 | NM_030811 |
| W90438 | NM_032127 |
| AA430653 | NM_032177 |
| 3495438F6 | NM_032294 |
| AW612141 | NM_033050 |
| AA417237 | NM_033225 |
| AI740538 | NM_033280 |
| M57703 | S63697 |
| 780099H1 | S63912 |
| AA714835 | S67156 |
| AA777347 | S76736 |
| AA521213 | S77359 |
| U39231 | S79852 |
| N77754 | S79873 |
| AA984230 | S80071 |
| U00672 | U00672 |
| U02478 | U02478 |
| AA019459 | U02680 |
| 3401107H1 | U03019 |
| AI580044 | U04816 |
| 3041874H1 | U07563 |
| 2457652H1 | U12465 |
| U39318 | U13175 |
| U13666 | U13666 |
| U13695 | U13695 |
| AA056652 | U14176 |
| AA456616 | U14970 |
| U18242 | U18242 |
| U18300 | U18300 |
| AA465444 | U18422 |
| U20537 | U20536 |
| U25128 | U25128 |
| U35237 | U26174 |
| AI884916 | U29171 |
| AA481076 | U31278 |
| NM_002411 | U33147 |
| 1671033F6 | U33429 |
| AA664389 | U35048 |
| 6313632H1 | U43030 |
| R09288 | U43522 |
| AA488645 | U47007 |
| U47077 | U47077 |
| 5801413H1 | U48449 |
| 2405358R6 | U48729 |
| AA186542 | U50078 |
| U51586 | U51586 |
| 1355140F1 | U51586 |
| AA455800 | U55206 |
| U56390 | U56390 |
| U83410 | U58088 |
| AA121261 | U58675 |
| AF027964 | U59911 |
| U60519 | U60519 |
| 2836805T6 | U62293 |
| U62433 | U62433 |
| 3188135H1 | U66673 |
| 3188135H1 | U66673 |
| 3188135H1 | U66673 |
| 3188135H1 | U66673 |
| 1360938T6 | U66679 |
| 809631T6 | U66684 |
| AA454652 | U67058 |
| AI214335 | U68755 |
| U69883 | U69883 |
| R98589 | U81375 |
| 5695322H1 | U82671 |
| AA745989 | U82979 |
| AA188256 | U83661 |
| 2526581H1 | U90904 |
| AA434064 | U95000 |
| AA773114 | U95740 |
| AA514978 | U96776 |
| Y07503 | V00510 |
| X96754 | V00557 |
| N67917 | V01512 |
| V01514 | V01514 |
| X87344 | X00369 |
| N53169 | X00567 |
| X02910 | X01394 |
| X01451 | X01451 |
| X01451 | X01451 |
| X01451 | X01451 |
| X01451 | X01451 |
| AA401046 | X02592 |
| 5537736F6 | X02592 |
| X87344 | X03066 |
| M10901 | X03225 |
| M54894 | X04403 |
| M54894 | X04403 |
| M54894 | X04403 |
| M54894 | X04403 |
| X07036 | X04408 |
| X07036 | X04408 |
| N75719 | X04744 |
| M19507 | X04876 |
| Y00816 | X05309 |
| M11233 | X05344 |
| AA479102 | X05972 |
| N24824 | X06182 |
| R33755 | X06547 |
| N41062 | X06820 |
| M86511 | X06882 |
| X07549 | X07549 |
| 1686702H1 | X07730 |
| X07979 | X07979 |
| X14723 | X08004 |
| J03561 | X12510 |
| J03561 | X12510 |
| J03561 | X12510 |
| J03561 | X12510 |
| M20566 | X12830 |
| M20566 | X12830 |
| M20566 | X12830 |
| M20566 | X12830 |
| U76549 | X12882 |
| M21304 | X13709 |
| X00351 | X13839 |
| X14830 | X14830 |
| X52882 | X14983 |
| AA598758 | X15187 |
| H27564 | X15729 |
| W15277 | X15940 |
| AA393214 | X15949 |
| M23502 | X16166 |
| K03515 | X16539 |
| M28880 | X166P9 |
| 2403512H1 | X16674 |
| AA868186 | X17093 |
| J03236 | X51345 |
| X51416 | X51416 |
| AA411440 | X51521 |
| AA058828 | X51602 |
| AA455222 | X51675 |
| X51804 | X51804 |
| T72877 | X52015 |
| X52195 | X52195 |
| X52947 | X52947 |
| U06434 | X53682 |
| 3081284F6 | X53702 |
| M36821 | X53799 |
| AA490256 | X54048 |
| J03198 | X54048 |
| M60761 | X54228 |
| M11025 | X55283 |
| M33294 | X55313 |
| M33294 | X55313 |
| M31627 | X55543 |
| X55544 | X55544 |
| AA487812 | X56134 |
| X56134 | X56134 |
| X56777 | X56777 |
| H27379 | X57198 |
| M83652 | X57748 |
| X58528 | X58528 |
| M81182 | X58528 |
| S60489 | X60111 |
| X60592 | X60592 |
| R76314 | X61587 |
| M83665 | X62534 |
| R11490 | X62947 |
| AI436567 | X63422 |
| X63465 | X63465 |
| AA083577 | X63527 |
| X63547 | X63546 |
| 2159360H1 | X63692 |
| X64074 | X63926 |
| X63926 | X63926 |
| X64083 | X63926 |
| 2535659H1 | X69168 |
| AA187162 | X69654 |
| X69819 | X69711 |
| AI310990 | X71491 |
| T53775 | X71874 |
| 3285272H1 | X73568 |
| U11087 | X75299 |
| X75299 | X75299 |
| AA454585 | X75755 |
| X75821 | X75821 |
| X75918 | X75918 |
| X76029 | X76029 |
| R43734 | X76939 |
| AI189206 | X77303 |
| H17504 | X80692 |
| R26434 | X80910 |
| AI521155 | X81892 |
| AA088861 | X83228 |
| U10440 | X84849 |
| 407169H1 | X84909 |
| 3576337H1 | X85030 |
| T55802 | X85117 |
| 4407508H1 | X85337 |
| AA025432 | X85373 |
| T56477 | X87212 |
| AA464034 | X89401 |
| X89576 | X89576 |
| X89576 | X89576 |
| R83270 | X89750 |
| 917064H1 | X91249 |
| X91809 | X91809 |
| X92106 | X92106 |
| AA187458 | X92396 |
| AJ000519 | X92962 |
| X94991 | X94991 |
| X96427 | X96427 |
| R85213 | X98022 |
| X98296 | X98296 |
| X99585 | X99585 |
| R48796 | XM_008099 |
| R50354 | XM_009915 |
| W15172 | XM_016514 |
| AK000599 | XM_027140 |
| 7157414H1 | XM_031246 |
| AA044653 | XM_031608 |
| L16953 | XM_032556 |
| 1266202T6 | XM_033674 |
| AA805691 | XM_033788 |
| AA861582 | XM_036492 |
| H86407 | XM_037453 |
| 778372H1 | XM_040459 |
| AA016239 | XM_041087 |
| AI580830 | XM_042041 |
| AI732875 | XM_042637 |
| AA463411 | XM_045320 |
| AA648280 | XM_046411 |
| 3038910H1 | XM_046691 |
| H63831 | XM_047328 |
| 1654210F6 | XM_048530 |
| AA460131 | XM_049228 |
| 5539620F6 | XM_049755 |
| AA682896 | XM_050250 |
| L42856 | XM_054964 |
| 1483347H1 | XM_056259 |
| AI307255 | XM_058135 |
| H74265 | Y00062 |
| Y00064 | Y00064 |
| M17017 | Y00787 |
| M28130 | Y00787 |
| L02932 | Y07619 |
| AA504415 | Y09781 |
| AI809036 | Y12336 |
| AA516206 | Y12851 |
| 000527H1 | Y13829 |
| 059476H1 | Y13829 |
| Y13834 | Y13834 |
| L11016 | Y14768 |
| 3141315H1 | Y17803 |
| 551234R6 | Y17803 |
| AA426103 | Y18000 |
| H97778 | Z13009 |
| AA402431 | Z15005 |
| L07555 | Z22576 |
| U51278 | Z23115 |
| M58525 | Z26491 |
| AW772610 | Z26652 |
| Z29090 | Z29090 |
| H19371 | Z32684 |
| AA136533 | Z35481 |
| Z48810 | Z48810 |
| U49083 | Z49148 |
| R70234 | Z56852 |
| 4902714H1 | Z69918 |
| 150224T6 | Z80147 |
| M29871 | Z82188 |
| AI808621 | Z82214 |
| AA699919 | Z83821 |
| 5538394H1 | Z83843 |
| 5020377F9 | Z97832 |
| AA460801 | Z98749 |
| AI625585 | Z98750 |
| 2673259F6 | Z98752 |
| R22977 | Z98946 |
| AA007595 | |
| AA188574 | |
| AA280754 | |
| AA283874 | |
| AA460392 | |
| AA508510 | |
| AA515469 | |
| AA526772 | |
| AA576785 | |
| AA634241 | |
| AA663307 | |
| AA663482 | |
| AA713864 | |
| AA714520 | |
| AA828809 | |
| AA868502 | |
| AI061445 | |
| AI086865 | |
| AI264420 | |
| AI378131 | |
| AI440504 | |
| AI567491 | |
| AI693066 | |
| AI709066 | |
| AI766478 | |
| AI821337 | |
| AI949694 | |
| AW439329 | |
| AW630054 | |
| H24679 | |
| H29257 | |
| H51856 | |
| H66015 | |
| H72339 | |
| N57580 | |
| N54592 | |
| W07570 | |
| T75463 | |
| R88730 | |
| R91509 | |
| T56441 | |
| T77711 | |
| W92423 | |
| 1274737F6 | |
| 1338107F6 | |
| 1508571F6 | |
| 1548205H1 | |
| 1594182F6 | |
| 1594701F6 | |
| 1879290H1 | |
| 1902928H1 | |
| 194370H1 | |
| 195337H1 | |
| 198381H1 | |
| 2021568H1 | |
| 205203T6 | |
| 2194064H1 | |
| 224922R6 | |
| 2398102H1 | |
| 2531082H1 | |
| 2630745F6 | |
| 264639H1 | |
| 2704982H1 | |
| 2716787H1 | |
| 2798810F6 | |
| 2832401H1 | |
| 2894096F6 | |
| 2919406F6 | |
| 2937644F6 | |
| 2950021H1 | |
| 3010621F6 | |
| 3123948H1 | |
| 3253054R6 | |
| 3290073H1 | |
| 3330472H1 | |
| 335737H1 | |
| 3674358H1 | |
| 3749346F6 | |
| 3820429H1 | |
| 3978404F6 | |
| 4031124H1 | |
| 4056384H1 | |
| 4097060H1 | |
| 4288779H1 | |
| 4301823H1 | |
| 4558488F6 | |
| 4570377H1 | |
| 5058893F9 | |
| 5541621H1 | |
| 5546249F6 | |
| 5546336H1 | |
| 5771839H1 | |
| 5804485H1 | |
| 5849807H1 | |
| 6530555H1 | |
| 656258H1 | |
| 6591535H1 | |
| 859993H1 | |
| 930273R6 | |
| 938765H1 | |

[0077] TABLE 3
Genes (By Genbank Accession Number) modulated at least 1.5 fold in
all cell lines and at least 1.7 fold in patient responder sample.

| Gene ID | Accession No. |
|---|---|
| 5543360F8 | AC009220 |
| AA237071 | AL035420 |
| AA455969 | D00015 |
| M25315 | D12592 |
| U41078 | D26512 |
| L10413 | L00634 |
| AA464627 | L09604 |
| 2470939H1 | L35848 |
| M84526 | M84526 |
| AI921879 | NM_002287 |
| AF204944 | NM_012105 |
| W77977 | NM_022336 |
| AA449040 | NM_024116 |
| AA521213 | S77359 |
| AA984230 | S80071 |
| AA456616 | U14970 |
| AI884916 | U29171 |
| U60519 | U60519 |
| X00351 | X13839 |
| AA868186 | X17093 |
| H27379 | X57198 |
| AA454585 | X75755 |
| X89576 | X89576 |
| AI580830 | XM_042041 |
| U49083 | Z49148 |
| 2398102H1 | |
| 2531082H1 | |

I claim:

1. A method of determining whether a patient will respond to treatment with an FTI by analyzing the expression of a gene that is differentially modulated in the presence of an FTI.

2. The method of claim 1 wherein the differential modulation is at least 1.5 fold.

3. The method of claim 1 wherein the differential modulation is at least 1.7 fold.

4. The method of claim 1 wherein the analysis is of the expression of more than one gene.

5. The method of claim 1 wherein the gene correlates with one or more nucleic acid sequences identified in Tables 1-3

6. The method of claim 1 used to monitor the therapy of a patient.

7. The method of claim 5 wherein the FTI is (B)-6-[amino(4-chlorophenyl)(1-methyl-1H-imidazol-5-yl)methyl]-4-(3-chlorophenyl)-1-methyl-2(1H)-quinolinone).

8. The method of claim 1 wherein the analysis is of the expression of a group of genes correlating with nucleic acid sequences identified in Tables 1-3 and wherein the FTI is (B)-6-[amino(4-chlorophenyl)(1-methyl-1H-imidazol-5-yl)methyl]-4-(3-chlorophenyl)-1-methyl-2(1H)-quinolinone).

9. A method of treating a patient comprising:
a) analyzing the gene expression profile of said patient to determine whether the patient will respond to treatment with an FTI, and
b) treating the patient with the FTI if the analysis indicates that the patient will respond.

10. The method of claim 9 wherein the analysis is of the expression of more than one gene.

11. The method of claim 9 wherein the FTI is selected from the group consisting of quinolines or quinoline derivatives.

12. The method of claim 11 wherein the FTI is selected from the group consisting of
7-(3-chlorophenyl)-9-[(4-chlorophenyl)-1H-imidazol-1-ylmethyl]-2,3-dihydro-1H,5H-benzo[ij]quinolizin-5-one,
7-(3-chlorophenyl)-9-[(4-chlorophenyl)-1H-imidazol-1-ylmethyl]-1,2-dihydro-4H-pyrrolo[3,2,1-ij]quinoline-4-one,
8-[amino(4-chlorophenyl)(1-methyl-1H-imidazol-5-yl)methyl]-6-(3-chlorophen yl)-1,2-dihydro-4H-pyrrolo[3,2,1-ij]quinolin-4-one,
8-[amino(4-chlorophenyl)(1-methyl-1H-imidazol-5-yl)methyl]-6-(3-chloropheny l)-2,3-dihydro-1H,5H-benzo[ij]quinolizin-5-one, and
(B)-6-[amino(4-chlorophenyl)(1-methyl-1H-imidazol-5-yl)methyl]-4-(3-chlorophenyl)-1-methyl-2(1H)-quinolinone).

13. The method of claim 12 wherein the FTI is (B)-6-[amino(4-chlorophenyl)(1-methyl-1H-imidazol-5-yl)methyl]-4-(3-chlorophenyl)-1-methyl-2(1H)-quinolinone)

14. The method of claim 10 wherein the genes correlate with one or more nucleic acid sequences identified in Tables 1-3.

15. The method of claim 9 wherein the treatment comprises the administration of an FTI and another therapeutic composition.

16. The method of claim 15 wherein said another therapeutic composition modulates MAPK/ERK signaling pathways, TGFβ, WNT or apoptotic pathways.

17. The method of claim 16 wherein said another composition is selected from the group consisting of tyrosine kinase inhibitors, MEK kinase inhibitors, PI3 kinase inhibitors, MAP kinase inhibitors, apoptosis modulators, and combinations thereof.

18. Articles for assessing the efficacy of treatment of a patient with an FTI comprising a medium with which patient gene expression profiles indicative of FTI response are determined.

19. The articles of claim 18 wherein the gene expression profiles are obtained from a group of genes correlating to more than one nucleic acid sequences identified in Tables 1-3.

20. The articles of claim 19 wherein the nucleic acid sequences are found in Table 3.

21. The articles of claim 18 comprising representations of gene expression profiles fixed to a medium.

22. The articles of claim 18 wherein the medium is computer readable.

23. Kits comprising articles for obtaining gene expression profiles for determining response to FTI treatment.

24. The kits of claim 23 further comprising instructions.

The application's sequence listing, which the Patent Office published only in electronic form, follows.

SEQUENCE LISTING (900 sequences)

SEQ ID NO: 1 - DNA, 376 bp, HUMAN
ctgtttaattatctgtaataatccttaaaaatcagcacacaaatccattccaggtagcttttgcaacccaactgctgtggtggcaattgtccagatgccacaaccccctaagagtgggtcatcctgggggagcaaggcctgagaaaggaaaggaagggaaaggccccctagtgcctgccccacagccctgaggaaggcacatatttagcctggcctgagacaggacaggaaggggccacagggctgaagtgcagggacaaaggggtcagggtcccaagtgtccggggccccagctacccaccccatgtctgtttttggttttgtcattaaaaaaaataaagtgacaatactggtggagaccagttgttgcactgtc

SEQ ID NO: 2 - DNA, 500 bp, HUMAN
gattggtaacctaatttgtggcctcctgacttttaaggaaaacgtgtgcagccattacacacagcctaaagctgtcaagagattgactcggcattgccttcattccttaaaattaaaaacctacaaaagttggtgtaaatttgtatatgttatttaccttcagatctaaatggtaatctgaacccaaatttgtataaagacttttcaggtgaaaagacttgattttttgaaaggattgtttatcaaacacaattctaatctcttctcttatgtatttttgtgcactaggcgcagttgtgtagcagttgagtaatgctggttagctgttaaggtggcgtgttgcagtgcagagtgcttggctgtttcctgttttctcccgattgctcctgtgtaaagatgccttgtcgtgcagaaacaaatggctgtccagtttattaaaatgcctgacaactgcacttccagtcacccgggccttgcatataaataacggagcatacagt

SEQ ID NO: 3 - DNA, 276 bp, HUMAN
taagttgtaaaaaaaattttgttatttataaatgaattacacaataaaataattatttttaaaagtcacaaatacaatcgttgtataaagtcattttggcatcaagtatctcttaaatatgttgcaaactattttccaaagagatgtggtccaaaccctctgaaggctttataattttgtattagataacaagtgaacaaaactgacaataaatactccaacaattattttttaaaatactaagtggcaaatgctattctaagtggcaaaacaatc

SEQ ID NO: 4 - DNA, 444 bp, HUMAN
tatcaacatttatatgctttattgaaagttgacaagtgcaacagttaaatacagtgacaccttacaattgtgtagagaacatgcacagaaacatatgcatataactactatacaggtgatatgcagaaacccctactgggaaatccatttcattagttagaactgagcatttttcaaagtattcaaccagctcaattgaaagacttcagtgaacaaggatttacttcagcgtattcagcagctagatttcagattacacaaagtgagtaactgtgccaaattcttaaaatttctttaggtgtggtttttgtcatgtagcagtttttatgtagatctatatataaaagtccacacctcctcagacagccaatgaaacaactaaatttcaatctgtacaacctaaatagtagttacagtcctctattgtacaaaatagttacacta

SEQ ID NO: 5 - DNA, 381 bp, HUMAN
aggctacatactgccaacaaccatgtgtctctctagtccacctcctgcccctgagatccggactcacatccgattgcctctttaatctctccgtttgaatgcccaacaggcatctcaaaaacacttcccccatggcctcccagtttcccccatggtaagaaacagcccaccggctactctgttcgagtcacactctcagacagatttctcctttctgtccatcatctcttccccacctctgtctctaaagtatatcacagcttcgtgccccagcacctagcacagcacatggcaagcttcccgtaaatgtgtgctgagtcacctctggaggtcacctgctaatgagggaggtctctcctggcacaggtcacttaggaaagg

SEQ ID NO: 6 - DNA, 518 bp, HUMAN
tttttttttttcatcttaacaacctttaatagttatctaaatgcagagtttgtttatgaaatgaaccaaagcagtttgtcatttcttactataaaatattgaaaatcaagtgcgaaactcagccactattggctaaagaaactaaataaaaaacgttaatgacctagaaaagcaaaagcccattttaaactacttaaagcctctgcactagtccaatgagtcaaaggcaagggagaagtaaacctctaaaactgaagacgaccctctaaaggagaaaactatagaagttaaagtatgcatgcttattatactatgggaaaccaggaaggaagggagagaaaaagaaaaagcacagtctattcatccagggcaatcagtaaaaatctacagtaacctgatcaaccacaaaatccttaggtgttgtgaaattacattggtcacttctgtaatcctaaaacttaaaatgattggtctctttaaaataaatggtttcaaaataataggatggtcccattaaa

SEQ ID NO: 7 - DNA, 380 bp, HUMAN
tttatttgggatcttttttatttttatacacatgacaagattttacatcaagaatagtcagttaaatagtacaaatttacattcatgaggaatgttaaagaaaattcaactaaaaaacccactttttcctgtgacccataatcccacattttacagtgcaggggagaaggggattagggggcatccaaaacaagtctctcccaaaaagaaatgatgtaaatttcacattccctctccacacaggatccaaatggtgagagtataatttacaattcatctttttcagctgtagattcctttgctgtttcttcttcttcatctgttcccacatccatttctgcatcttcgtcttgctctgtgtcttctgttgtgtcttctgc

SEQ ID NO: 8 - DNA, 469 bp, HUMAN
aaaaaaaaaacatgaagggagacatgactttattagaaaaataaaaaacaactgaggtgatgggttggtcttcagcggatccttggtggatgaggctgcttttggctgcactggccttctcccgctcccgccgccgcgcagggtccaactcaaaacagcgccatagcctcagggtctcatctgctgctgcggatgccactgtggccccatctgggctcatggtcagactcaggacccgggatgtgtgacctttgagttcagccaccttggccatggttgggtacttccaaataactagctgattctgtgcaaagccatggcctgagatgagctccttgtaagggggagaccagaggatggagcacacctgggaatgggcatccacggcactcagacaggccccagagcaaaaattccagatgcgaatgtgtcgatcactggtgcaccctcctgtggcaaggacatttga

SEQ ID NO: 9 - DNA, 335 bp, HUMAN
caacgagaaggtggagctgcaggagctgaatgaccgcttcgccaactacatcgacaaggtgcgcttcctggagcagcagaataagatcctgctggccgagctcgagcagctcaagggccaaggcaagtcgcgcctgggggacctctacgaggaggagatgcgggactgcgccggcagtggaccagctaaccaacgacaaagcccgcgtcgaggtggagcgcgacaacctggccgaggacatcatgcgcctccgggagaaattgcaggaggagatgcttcagagagaggaagccgaaaacaccctgcaatctttcagacaggatgttgacaatgcg

SEQ ID NO: 10 - DNA, 518 bp, HUMAN
aagtcacctataaatatacttacagaaccaccaagtcaaaatgtggagaaagagatgaattatccccaaagagaattaaagtggaggatgggtttccagatttccaggattctgtgcaaacactcttccagcaggctagagctaagagtgaagaacttgcagctcttagttcacagcagcctgaaaaggtgatggcaaagcagatggagttcctttgcaaccaagctggctatgagagactgcagcatgccgagaggaggttgtctgcagggctttacaggcagagctcagaagagcacagtcctaacggcttgacttccgataactcagatggacaaggagaaagacctttgaatctccgaatgcctaatttacagaacagacaaccccatcattttgtggtggatggggagctgagcagactttaccccagtgaggcaaagtcccactcatcagagagccttgggattttaaaagactaccctcattcagcttttaccttagaaaagaaagtcatc

SEQ ID NO: 11 - DNA, 460 bp, HUMAN
tttttatttttttttttttttctttactcaccattttaatactgccgccaactataacagattaaaaatgtacacatgacaaagtggaaaaaagtcccaaaatgcaacagtttcagcaaaagaacatactggctaaggattactacagttaacatcggtacagtaaaaacgatggcaaacagggatttggcaccacatttacaaagtaaaagcatgcactgttaatacactttagatgtttctcaacagaaaaggccatgaagatggaaaacaagaggcaccatgtacaaaactccctataactgggacaaacaagcaagaatcaaagtggtcaatttagtaaatatgtagcagcaaagtcactggttctgtttggaatttagcaatttgcatttctgattggcagctgccctgggtgtgtctgtatccaagaagctgactttatccaactacatcagca

SEQ ID NO: 12 - DNA, 493 bp, HUMAN
ttttttttttttgcatatattaattcagtttaatcatatcaattcttaaacaaaaaacttcctccaagagacaatagttcacagtaactgcaaagcttactcacaatttttaaaaatatcgctcatgcttagcattcaaagaagatattatagaataactgtaaaaacttttaccaggaacatcagcttctgacttgaaaaattacaaatactgaagcattttggtatcagacacagtagttttgacattgtctgttcatttgatgagtttctggaagtttggaaaattgtacctctataattggataatgcgcttattctaaactaaacattttcaaatgtagaaaacaaactagcaagctacacatacaaagaaaagccctctaagatttgcttttcacatgttgaatgccagcatgtgcaccgtgaatcctggaagactagaattgatacatacgcttggcttgaagtctataccccaggctcacgatgg

SEQ ID NO: 13 - DNA, 428 bp, HUMAN
tttttttaaaacaaacttaactttatttcctcactttcacttaaaacttgattttataaaacacatgaaaaaacatttttaagagttctgtatcacagaacattaaacagtacaaatatccattgcttcataggttcaagttacataaattaaagtcaaataattggaaactgattcaatagggaaaactatacatgaaatgaaggtcaaaaggagctatacagcaatatttcattgtttatagattatgagttactttcaggaccttaacaaagattctgaatatttagacttcctttgttgtattttatacttaaatatctccctacctatactgagtcaaactacttgaccaaaacatctgatttaggaaagcatctagctttatagcacaagtttttccatctacagttactatcttcaaagga

SEQ ID NO: 14 - DNA, 473 bp, HUMAN
gcactgtgtgttcagtgaaaactagagaaacacaataagcaaatcacatgaaggctgagatgattgagatgaaagttaacatagtgtgaatgaaagtctggccaacagagcagtagatgatataacaaagaaagcatgctttctgaggagatagtggggataatccctgaagagttggcagtgtgagtgcactcatttatcttctgtgaggtgggatttttgtgttcctcacacccatgtaattattcttagaattgagattgctacacggagcagtccttgacgatcgtgtttctgacgtttctcttccttgcctggactgcctttgacaaggcagaaatgaacatgaaaagtccccaggagaggggagctgtgtagtgagggatactgagggcagtcctgtggctgaggggcacagattgaactgctgaactagttggaggtctagatgaggtgctttacgcatcagctgc

SEQ ID NO: 15 - DNA, 411 bp, HUMAN
cgatgactcaatcggcactgggtatgacctgtcagcctctacattctctcctgacggaagagtttttcaagttgaatatgctatgaaggctgtggaaaatagtagtacagctattggaatcagatgcaaagatggtgttgtctttggggtagaaaaattagtcctttctaaactttatgaagaaggttccaacaaaagactttttaatgttgatcggcatgttggaatggcagtagcaggtttgttggcagatgctcgttctttagcagacatagcaagagaagaagcttccaacttcagatctaactttggctacaacattccactaaaacatcttgcagacagagtggccatgtatgtgcatgcatatacactctacagtgctgttagaccttttgggctgcagtttca

SEQ ID NO: 16 - DNA, 287 bp, HUMAN
gccggagagtctacaatgttacccagcatgctgttggcattgttgtaaacaaacaagttaagggcaagattcttgccaagagaattaatgtgcgtattgagcacattaagcactctaagagccgagatagcttcctgaaacgtgtgaaggaaaatgatcagaaaaagaaagaagccaaagagaaaggtacctgggttcaactaaagcgccacgctgctccacccagagaagcacactttgtgagaaccaatgggaaggagcctgagctgctggaacctattccctat

SEQ ID NO: 17 - DNA, 473 bp, HUMAN
tttcaatgatatatttgccagttattttattttttctaaaaacaatagaaaaaaatcaactttaaaaagcaaaatgtacttaaataaaaaaaattagggtttatagtacctataatactaggtactatatactaggattgaaattctgtgtaactgctataaacgttttattaaagttatttacatttaatggcaatatttacagagaaacattgtgtaaatcttaaaattttttaaaaacaattcttaaatacaaatctgttaaagaaaaaaaaaagatggtaagcataaaaaagttcttttatgcccaaagtccaatttgaggcagtttacattatggctaaatctttcagtctcaagactcagccaaggtttgtgaggttggcattgattctggcatttgaaacaagttcataggtgattgctcggggacatttcggttagaaggaatcggtttcccgacttttgcctta

SEQ ID NO: 18 - DNA, 344 bp, HUMAN
tcatcaactggccctggagtgatttcttccgaaccctcatagcggcaatcctctacctgatcacctccattgttgtccttgttgagagaggaaccactccaaatcgtcgcagggtactgggctaatcgtagtgccttggtagagctatgtacttccgtcggagcagaatagagccatgccgagatggccgtgtaggacttcctcatctcctgaactgaatactctcatgaatatctccaccacaaacattcagcagcaatccacctctttgagtaaagtgcttattgggaactttgcttccagctgcaatcaccctcctggtgtggcacatatgtgtgtgctag

SEQ ID NO: 19 - DNA, 295 bp, HUMAN
ggtaatgaaaccgtgaactttattgagaactttcaagcatcataacttgaagaagtatttctcaattcagtttatcgaaatacttcagctttccagctggatctgggattattgtttcactaccaggtttccagccagcagggcagacttctccgtgtttgtcagtgtactggaatgcttgaaccaaacgtagtgtctcatccactgatctacccacaggaagatcattcagagtaatttgtcttaggattcctttgtcatcaataatgaagagacctctaagagtgtggcctga

SEQ ID NO: 20 - DNA, 387 bp, HUMAN
tggtgctcatcttcgctcgtttaatttcagtcagatattaaacatttacaatttttttatataacaaaacaagaacatgcaaagttacaaatatagaaaatataaagtacatgcatatttcaaagacctgttaatggtgtccactttggattcttacatgaaacgattcagtgcacattgtaagcctaaggaccacgcaaaagggtttccacatattaagtattcagtaccttacaaaagttaatgcattagacacttcagatgttaactgctctaaacaaaactcctaagtctgtcctatgcaatatatattttatatacatatatatttttacatagaatactcacaaagtgcaagccaataataacattgcagaaaaaaaaaaa

SEQ ID NO: 21 - DNA, 343 bp, HUMAN
  Unsure (253)..(253): Any base may occupy this position.
  misc_feature (253)..(253): Any base can occupy this position.
ttcccagccatgctttgcaagatgggctttgcggtacatactagtgaactatcgtgaatccacgggctttggccaggacagcatcctcaccctcccaggcaatgtgggacaccaggatgagaaggatgtccagtttgcagtggaacaaggagcaccaggaggaacacattgatgcaagccatgtggaccttatgggtggatcccatggtggcatcaataccagccacatgattggtcagtaaccagagacctncagggcctgagtggcacgagaacccgtgataaacatagccaccatgtagggcaccactgacatccctgactggtaagaggtggaggctgg

SEQ ID NO: 22 - DNA, 502 bp, HUMAN
ttttttttttttttggctgggactgccccaaaggcagacgaggtttattgggcagcagctgggaaaatcagcggttggacttggccacacgctccagctcgtccttcttcttaatggcataggagttcgaggagcccttggcagcattgatgagctcatctgccaggcactcagcaatggtcttaatgttccggaaggcagcctcacgagcgcctgtgcacagcagccagatggcctggttcacacggcgcaggggggacacatccacagcctgtcgtctcacagtcccggcgcgcccaatgcgtgtggagtcctcccggggaccactgttgatgatggcgttcaccaggacctgcagagggttctcgcctgtgagcaggtgtatgatctcgaaggcatgcttgacgatgcgcacagtcatgagcttcttgccgttgttgcggccgtgcatcatcatggagttagtgaggcgctccacaatgggacactgaactttgggaaa

SEQ ID NO: 23 - DNA, 461 bp, HUMAN
gcaatgagataacgttttattttaattctcaccatttatatacaaacacaagtgaataaaacacatcgcaaaatggtaaaatttcatatttagtatttataggtgcatagtttcatgctcacatatttttgagtattatatatattaacaaatttcacaatacgtcattattcttagacagtatcattaaaagacacctaaaaatcttataatatatgatagcaaatcactaacaacttctgaacaacagcaacaaaaaaatagtgaggatttagaaataagtggtagtcacttaggtgtttttaatttgttttaacatcgtagattgaagccacaaaatccacagcacacaaagaccctgctaccatgtattcacttcagtgaaagggaagcaccgaaatgctgagtgggggcaggtacagatacatcaatcactgctgatggaagacttcgagatacac

SEQ ID NO: 24 - DNA, 539 bp, HUMAN
aattcggaagaggaaggtgaagaagggcgtccaaaggatgaccgccacctccgtggctgtggctaccttcccggctgcccgggctccaatggtttccacaacaacgacaccttccacttcctgaaatgctgcaacaccaccaaatgcaacgagggcccaatcctggagcttgaaaatctgccgcagaatggccgccagtgttacagctgcaaggggaacagcacccatggatgctcctctgaagagactttcctcattgactgccgaggccccatgaatcaatgtctggtagccaccggactcacgaaccgaaaaaccaaagctatatggtaagaggctgtgcaaccgcctcaatgtgccaacatgcccacctgggtgacgccttcagcatgaaccacattgatgtctcctgctgtactaaaagtggctgtaaccacccagacctggatgtccagtaccgcagtggggctgctcctcagcctggccctgccatctcagcctcaccatcaccctgctaatgactgccagactgtggggag

SEQ ID NO: 25 - DNA, 493 bp, HUMAN
aatattttataacttgtccatacagagttttgatgatggagactattttcctgtgtggggcacatgccttggatttgaagagctttcactgctgattagtggagagtgcttattaactgccacagatactgttgacgtggcaatgccgctgaacttcactggaggtcaattgcacagcagaatgttccagaattttcctactgagttgttgctgtcattagcagtagaacctctgactgccaatttccataagtggagcctctccgtgaagaattttacaatgaatgaaaagttaaagaagtttttcaatgtcttaactacaaatacagatggcaagattgagtttatttcaacaatggaaggatataagtatccagtatatggtgtccagtggcatccagagaaagcaccttatgagtggaagaatttggatggcatttcccatgcagctaatgctgtgaaaaccgcattttatttagcagagtttttgtta

SEQ ID NO: 26 - DNA, 448 bp, HUMAN
agtgactccagaggccttcacaaagggcagctggagtggggaagtaggactcaaaggtgcggcagagagccccagctgggcacttgttaactcctgaggtccagtcccatcctctgtgccagttgctcttgcacgtgtgggaggtgtgacaatcctcccaccagcgctgacagtcctctttgcataagggcacatccaggaagcgttctttgcgccagtcctgattcacctgctggatccagggccccaggttgggtgagcactcatagagacaggtgtcctggatgaagtggcgcttgcaggcgggctccatcttgccgcagtggtcccagttaaagttgtacaggcgggaggtgtccttgtgcagctcctggctggtgctggctgtgcagcaggcattcttcttccagggactgcattggtcatgcagcttgtcctcaggacctgg

SEQ ID NO: 27 - DNA, 421 bp, HUMAN
gtgatctgcatgtggcagggctgcgcagtggagcggccagtgggcaggatgacgagccagacccctctgccccagtccccccggcccaggcggccaacgatgtctactgttgtggagctgaacgtcgggggtgagttccacaccaccaccctgggtaccctgaggaagtttccgggctcaaagctggcagagatgttctctagcttagccaaggcctccacggacgcggagggccgcttcttcatcgaccgccccagcacctatttcagacccatcctggactacctgcgcactgggcaagtgccacacagcacatccctgaagtgtaccgtgaggctcagttctacgaaatcaagcctttggtcaagctgctggaggacatgccacagatctttggtgagcaggtgtctcggaagcagtt

SEQ ID NO: 28 - DNA, 532 bp, HUMAN
cactcccgacggatctttgcttctcacgccagctggatgtgtggaatctggtgaaaatgtaatgaataccacttatgttttctccaggaagaatcttaaaaggcccatcgctcatcttccatgtcctggaaaagccactcttgctgttcgctgctgtccggtctactttgaactgaggccaatggtggaaacaggtgtggagctgatgagtctgccctaccgcctggtgtttgctgtggcctcggaggattccgtgcttctgtatgacacccagcagtccttcccttttggttacgtgtctaatatacattaccaaaccctcagtgaaatttcatggtccagcgatggtgccttcctggccatttcttccacggacggttactgcccatttgtgacatttgggaaaaatgaacttggaattcctttgaaaaagaagccacttttgaaaatgggaactcctgttaaagcaaggaaaaccacgggtctgagacatcggggtgtttttccaggaccccaaccgctaaaggggacc

SEQ ID NO: 29 - DNA, 262 bp, HUMAN
  misc_feature (126)..(): Any base.
  misc_feature (126)..(243): N=any base
ggcggctgccaggatcccgggcccggatcgcacgaagcccgcgcggccgtctcctccgcggccacccctgcgcctcccgcgagctccacttcccatctgcgctaggccaccccagctggggaagtnntngtggctgtcgagaatgggggtctgtgggtacctgttcctgccctggaagtgcctcgtggtcgtgtctctcaggctgctgttccttgtacccacaggagtgcccgtgcgcaggangatgccaccttccccaaag

SEQ ID NO: 30 - DNA, 449 bp, HUMAN
cttttctataaaacttcattttgtaatttttttccaagaagtagtaagggggaaatattgcaattatgtaaaggtaaggaacaatggtgtataaaaataatttaagcacaatattaataacaaagcaactttttttcaaggaaaactagtaggtcatcttgcccaagatttttccaaaggtattaaatatattttcaataacagtacatacaaatacacatacacaaatataccacacagacacatgtgcacatacatgcacacacacacacacacacacacacacacacacacatatatatatacagctcaagtatttttttggtgtgcattctagctaatccacatagctaaagtgaaaaaacactgaaaagatcaatgcctgagtaaccttaaatttgaacaaactatgcattggatgtgaatttttggaggcatgctaagatttc

SEQ ID NO: 31 - DNA, 483 bp, HUMAN
aacagatttaatattatattgcagttttcagcgatgcagaatgagctgcaattgtgttttaaggagaagccaaatggggatggttgtccctgcaacatggtgccactcctgggccatgtgcagcctcagtggacactcttccatagcgctgaggccctgcccgcctccagttaccctgtactgcccatgccttacagtcagtgcgcaggcttcaccttttcatcaccagcctctctgctcagtgctctggagttcttgaccttgtcctttatcatgagatttgctgaaatcactaatgaaaataactcccaaaagcaacaaacaaaaatattagtttaactggcactgtggtatattaaaaggcacaagggcattgtggcttaacacttttgctggatcccaagagacgcacatgatgttaaaaagagatctggcagcagtactaatactacatttcagtgtaatcatcttggggtggtttgg

SEQ ID NO: 32 - DNA, 569 bp, HUMAN
tttttttttttttttttttttttgcctttgcaaagcttttatttcatgtctgcggcatggaatccacctgcacatggcatcttagctgtgaaggagaaagcagtgcacgagaaggaatgagtgggcggaaccaacggcctccacaagctgccttccagcagcctgccaagcgcatggcagagagagactgcaaacaaacacaagcaaacagagtctcttcacagctggagtctgaaagctcatagtggcatgtgtgaatctgacaaaattaaaagtgtgcatagtccattacatgcataaaacactaataataatcctgtttacacgtgactgcagcaggcaggtccagctccaccactggcctcctgccacatcacatcaagtgccatggtttagagggtttttcatatgtaattcttttattctgtaaaaggtaacaaaatatacagaacaaaactttccctttttaaaactaatgttacaaatctgtattatcacttgtatataaatagtatatagctgatcattaataaggtgtataagtacaatgtattctaaaactgttaagc

SEQ ID NO: 33 - DNA, 466 bp, HUMAN
atccgccagacatttgccaagttgtagaggtgaccactgagagcgacgagagccggtcagcatgagcgagctctaccctctgcagatctcccccgtgtcttcctatgcagaaagcgaaacgactgatagtgtgcccagcgatgaagagagtgccgaggggcggccacactggcggaagaggaatattgaaggcaaacagtacctcagcaacatggggactcgaggctcctacctgctgcccggcatggcgtccttcgtcacttccaacaaaccggacctccaggtcaccatcaaagaggagagcaatccggtgccttacaacagctcctggcccccttttcaagacctccccctttcttcctccatgaccccagcatccagcagcagtcggccagaccgtgagacccgggccagcgtcatcaagaaaacatcggatatcacccaggcccgcgtcaagagctgttaa

SEQ ID NO: 34 - DNA, 446 bp, HUMAN
tgaacatataaggctagaaaaagaaatttctaagttaaagcagcaaaatgaacagctaataaaacaaaagaatgaattgttaagcaataatcagcatctttccaatgaggtcaaaactctggaaggaaagaacccttaaaagagaggctcacaaacaagtaacttgtgagaattctccaaagtctcctaaagtgactggaacagcttctaaaaagaaacaaattacacccgtctcaatgcaaggaacggaatttacaagatcctgtgccaaaggaatcaccaaaagcattgtttttttgatagccgatcaaagtctttaccatcactcatccagttcgctattttgatacatcaagtttaggcctttgtcagaggtgaaaatgcaggacagagagtgtggatctcagccaggtcttggaccgctctcaggaaggatgtgctgagtg

SEQ ID NO: 35 - DNA, 529 bp, HUMAN
  misc_feature (392)..(529): N=any base
acctctctgtggtggatttacatggccaagctgtgtgaagaaataggaaagaagaagttaccattaaccaaggatatgagagaacaaggagttaaaagcaatccatgtgactcaagcctttcacatactgacagatggtatctgccagtctcttcaaccctcttctcactttttaaaatcttgttccatgcctccaggtttatctttgtcttatctaccagtttattcctgtgaacttcagattgaaccattcattgcagcagtagccttaaaaaggcttttgtttatttctttggtttgttaactagtgtcatctatttagagaaacatttttgtttttaattgctcaaagctgtccgccgctagtcttatgagccaatctactaaaactntggagaaactttgtatgtgcacacaaaagtattcaagagacagtattgctaacatctcatcttaatggcctttggtaatgagaagttttaggtgcntccaaaccaatataaatgggataatggtggtaatttggggn

SEQ ID NO: 36 - DNA, 423 bp, HUMAN
actctgcttacattttataagtttaaggtcagctgtcaaaaggataacctgtggggttagaacatatcacattgcaacaccctaaattgtttttaatacattagcaatctattgggtcaactgacatccattgtatatactagtttctttcatgctatttttattttgttttttgcatttttatcaaatgcagggcccctttctgatctcaccatttcaccatgcatcttggaattcagtaagtgcatatcctaacttgcccatattctaaatcatctggttggttttcagcctagaatttgatacgctttttagaaatatgcccagaatagaaaagctatgttggggcacatgtcctgcaaatatggccctagaaacaagtgatatggaatttacttggtgaataagttataaattcccact

SEQ ID NO: 37 - DNA, 403 bp, HUMAN
  misc_feature (187)..(187): N=any base
acagaaacaagaaggcagctgctgcttcctgctcagcactggggactatgcctgcgccgatggtagtgtccggaaagagacctgccaagacgccctctcgtccaactatgcccaggctgaagtcctcaccctctcttaaagcggcaccaacgtgagagagacaggcagacagacagaaagccagagnttaggggaaactctggaacccagacaagaatcttttcgctgggaaagactcagatatccttgtttgcacaggactggtggaaaatctcccatgcgaccctcggggcccagagccatctgggtctgatgttctgttccatttgtacatcgaagagatatatatgcacatattagtatctatattcattacatattatactcttgtgtgtagtgcaaa

SEQ ID NO: 38 - DNA, 363 bp, HUMAN
  misc_feature (283)..(343): n=any base
ttttcaattgtcattgttttattttttccaaaataacataaaaatactttccagttgaattacataaaaaatttaatccataaaaccattatacagtcatgcattggataacaatgggaatgtgttctgatgaatgcatccttgggcgattttgtcactgtgtgaacatcataagagtgtacttacacaaacctagatggtatagcctattgttcctaggctataagcttgtaaagtgtgttactgtactgagtactataggcaactgtaacacagtggtacntgtgtatctaaacaaatctaaaacattagaaaaggtnccaaaaaatatgggtataatggnttaaaaaaatgggtacacct

SEQ ID NO: 39 - DNA, 463 bp, HUMAN
  misc_feature (298)..(463): n=any base
tttttttggaaatccaaaggtctcatttattaatggcattttatgagtgtcatagcatttatttaaacatagagttgtcattggtaatagaaagttaaacagaaacccaactcatgaatctgaaaatgatccattaataatatatagtattgtccgaagcctcccagctgctgggaacattgggaaggcatgatatttgtcttcaataaaccattttctttgtcaggttcaccagcttattttcctttcccctataaacatattccccttgcttttgcccttgatttaaataaacatnaaaaagataacatttagntccattcacaagaaactggtaatatgnaaatattttgaatggaaacatatctctttggggagtggaaatgcgggtngaagtaggacattttaggtaaagagtaaagaggtaatnaagggtaatcnctcaggggaagtggtaatantt

SEQ ID NO: 40 - DNA, 322 bp, HUMAN
  misc_feature (1)..(104): n=any base
  misc_feature (1)..(311): n=any base
ntgncaacacgtttaattctgtggccaggctagcctgtctccaaggcctggtggacagcacgtcaccagaggctgccgnaggagcaggcagggccagccctganagaggagtgcaggcaaaggcgggggctctgaagtggctgctggaggcanagngccccgggctgggagtgctcagtagccgtcgttagcccaggtgacctcgtagtcggggtacttggctttgattttctcagttgaaatggcgtgctgggcaaggaccataggccatggaatagccgtacacgtgaatcttnttgtcntgactctcngtcgggagatt

SEQ ID NO: 41 - DNA, 627 bp, HUMAN
  misc_feature (1)..(627): n=any base
gtgtttttggaagtttattatatgaagatggtatacaaaatacattcatcatgactagaaatataggaccaaaccatgtctgtcttatatctgtagcatatattcttggtttgtataaaagtaactttaaaattccagtttccttaaatagttatgcacaaaacacacatacacccacacacacacacacacacacacacacacatacagttacaccactgtcggccaaagatgcactcctcctttaatcaatttaaatgaggctagcgagtatctgtttgatgtttgcattcttgtgggctaggaaacaaggcacgggtccctaaaattaacatctcggtgtcacttcttggactgacaagacacagacttgcacatggtttcagccccattccacccagactgttccacgtacattatctcagaaactctgaaaggaagtgctcgttctttgttagtgccaaccatttttgtcataaatggcaaatgattgggatattatcagttaattcatgtttcaatttcagtgctattttaatggacaagcacttgtaactagcccattattacaagtctccatttttttccacattaanctccngagggaccatctttggccgatggagg

SEQ ID NO: 42 - DNA, 458 bp, HUMAN
  misc_feature (1)..(458): n=any base
ttgattatctggatgcaggttttattatcattaggatgactgtcatcgacaagggataggggcttagagggttatatacaaaccacaattcctaggcgatgtttcaatattcccacacacatttatcccacagccagacacagcacaacaccacaggntttgcccctacatatgcttctccaagcagtaacacagctgtgggtcagggctctgcacccacaaagggatgcccagaaaggagaagatcctgggtcctgggggtgaagtttacacatggagaatcctgccaggttggggaggggatggaagctggattttncacacaacgcttcagtcccaccnccacccttcacttggcttgccctccccagggggctccctggtccccacttggggggagtctttgncaaagacacagaagggaccatntttagccanggctaanggaaggagcaggc

SEQ ID NO: 43 - DNA, 458 bp, HUMAN
  misc_feature (1)..(458): N=any base
tttttntttttttttttttttctctgtgacaaactttattaaattttgcatcagtacagggcatctcttattgcatactagaatcccaggattcaggcgggtggtaaagtggcaacgacgaatttgggtatctggtctcccaaaagtacttgccgctctacccctgactctgcaatggctgccaggcggatcactcctccactggagccatcccgctccatggccaaagcgaganatntggcacgtgaattgcagacactcttccttggtcatgccttcccggtaggtagcatcaacatagccatagatgtaggagctcccggagcctccaatggcaaaggactgccttaccatcataccccccataggcactggagtacacctngccctccttncttggagggtcccagcctgcgaatgatgattccngccatcaggtcttcccggtatcggtaaca

SEQ ID NO: 44 - DNA, 152 bp, HUMAN
  misc_feature (1)..(152): N=any base
attcggcacgatgggaagatggcggaggtgggggagataatcgagngctgccgctacccgtgctgcggcggaaccaggacaacgaagatgagtggcccctgncgaggatcctgagcgtgaaggacatcagtggccggaagcttttctacgtc

SEQ ID NO: 45 - DNA, 305 bp, HUMAN
ccagagccagaaatggaaagtacagacttctgaaaatatctattggaaaatgagcaacttgtgattggatcatatagtcagccttcagattcctgggataaggattatgattcctttgttttacccctgttggaggacaaacaaccatgctatatattattcaggttagattctcagaatgcccagggatatgaatggatattcattgcatggtctccagatcattctcatgttccgtcaaaaaatgttgtatgcagcaacaagagcaactctgaagaaggaatttggaggtggccacattaaag

SEQ ID NO: 46 - DNA, 240 bp, HUMAN
caatcagtaaatatttattattttctgtaactaaagtactgggctgtggtaggggagacaacaatcaaagacatagccttgtcttccagaagctcacaatctagttgggaattcaagaataccccttagaaaagttcattgacaatttacgaggtgctattagacagtaggagagaaaggcatacataccagggcccagggaagaagagctttgtgaatgaagaaggaaaaagtgtaagt

SEQ ID NO: 47 - DNA, 1184 bp, HUMAN
atctgccacgatgttgctgctcagcctgaccctaagcctggttctcctcggctcctcctggggctgcggcattcctgccatcaaaccggcactgagcttcagccagaggattgtcaacggggagaatgcagtgttgggctcctggccctggcaggtgtccctgcaggacagcagcggcttccacttctgcggtggttctctcatcagccagtcctgggtggtcactgctgcccactgcaatgtcagccctggccgccattttgttgtcctgggcgagtatgaccgatcatcaaacgcagagcccttgcaggttctgtccgtctctcgggccattacacaccctagctggaactctaccaccatgaacaatgacgtgacgctgctgaagctcgcctcgccagcccagtacacaacacgcatctcgccagtttgcctggcatcctcaaacgaggctctgactgaaggcctcacgtgtgtcaccaccggctggggtcgcctcagtggcgtgggcaatgtgacaccagcacatctgcagcaggtggctttgcccctggtcactgtgaatcagtgccggcagtactggggctcaagtatcactgactccatgatctgtgcaggtggcgcaggtgcctcctcgtgccagggtgactccggaggccctcttgtctgccagaagggaaacacatgggtgcttattggtattgtctcctggggcaccaaaaactgcaatgtgcgcgcacctgctgtgtatactcgagttagcaagttcagcacctggatcaaccaggtcatagcctacaactgagctcaccacaggccctccccagctcaacccattaaagacccaggccctgtcccatcatgcattcatgtctgtcttcctggctcaggagaaagaagaggctgttgagggtccgactccctacttggacttctggcacagaaggggctgagtgactccttgagtagcagtggctcttcctagagtagccatgccgaggccggggcccccacccctcctccagggcaaccccttggtcctacagcaagaagccagaactgttggaatgaatggcagccctccctggagaggcagcctgtttactgaatacagaggatacgtttacaaactgaatacgcataataaataactgcacattctccatccaaaaaaaaaaaaaaaa

SEQ ID NO: 48 - DNA, 2684 bp, HUMAN
cagggcagaccatgcgcccgccaagtccgctgcccgcccgctggctatgcgtgctggcaggcgccctcgcctgggcccttgggccggcgggcggccaggcggccaggctgcaggaggagtgtgactatgtgcagatgatcgaggtgcagcacaagcagtgcctggaggaggcccagctggagaatgagacaataggctgcagcaagatgtgggacaacctcacctgctggccagccacccctcggggccaggtagttgtcttggcctgtcccctcatcttcaagctcttctcctccattcaaggccgcaatgtaagccgcagctgcaccgacgaaggctggacgcacctggagcctggcccgtaccccattgcctgtggtttggatgacaaggcagcgagtttggatgagcagcagaccatgttctacggttctgtgaagaccggctacaccattggctacggcctgtccctcgccacccttctggtcgccacagctatcctgagcctgttcaggaagctccactgcacgcggaactacatccacatgcacctcttcatatccttcatcctgagggctgccgctgtcttcatcaaagacttggccctcttcgacagcggggagtcggaccagtgctccgagggctcggtgggctgtaaggcagccatggtctttttccaatattgtgtcatggctaacttcttctggctgctggtggagggcctctacctgtacaccctgcttgccgtctccttcttctctgagcggaagtacttctgggggtacatactcatcggctggggggtacccagcacattcaccatggtgtggaccatcgccaggatccattttgaggattatggtctgctcaggtgctgggacaccatcaactcctcactgtggtggatcataaagggccccatcctcacctccatcttggtaaacttcatcctgtttatttgcatcatccgaatcctgcttcagaaactgcggcccccagatatcaggaagagtgacagcagtccatactcaaggctagccaggtccacactcctgctgatccccctgtttggagtacactacatcatgttcgccttctttccggacaattttaagcctgaagtgaagatggtctttgagctcgtcgtggggtctttccagggttttgtggtggctatcctctactgcttcctcaatggtgaggtgcaggcggagctgaggcggaagtggcggcgctggcacctgcagggcgtcctgggctggaaccccaaataccggcacccgtcgggaggcagcaacggcgccacgtgcagcacgcaggtttccatgctgacccgcgtcagcccaggtgcccgccgctcctccagcttccaagccgaagtctccctggtctgaccaccaggatcccagcccaagcggcccctcccgccccttcccactcgcagcagacgccggggacagaggcctgcccgggcgcgccagccccggccctgggctcggaggctgcccccggccccctggtctctggtccggacactcctagagaacgcagccctagagcctgcctggagcgtttctagcaagtgagagagatgggagctcctctcctggaggatgcaggtggaactcagtcattagactcctcctccaaaggccccctacgccaatcaagggcaaaaagtctacatactttcatcctgactctgccccctgctggctcttctgcccaattggaggaaagcaaccggtggatcctcaaacaacactggtgtgacctgagggcagaaaggttctgcccgggaaggtcaccagcaccaacaccacggtagtgcctgaaatttcaccattgctgtcaagttcctttgggttaagcattaccactcaggcatttgactgaagatgcagctcactaccctattctctctttacgcttagttatcagctttttaaagtgggttattctggagtttttgtttggagagcacacctatcttagtggttccccaccgaagtggactggcccctgggtcagtctggtgggaggacggtgcaacccaaggactgagggactctgaagcctctgggaaatgagaaggcagccaccagcgaatgctaggtctcggactaagcctacctgctctccaagtctcagtggcttcatctgtcaagtgggactctgtcacaccagccattcttatctctctgtgctgtggaagcaacaggaatcaagagactgccctccttgtccacccacctatgtgccaactgttgtaactaggctcagagatgtgcacccatgggctctgacagaaagcagatcctcaccctgctacacatacaggatttgaactcagatctgtctgataggaatgtgaaagcacggactcttactgctaacttttgtgtatcgtaaccagccagatcctcttggttatttgtttaccacttgtattattaatgccattatccctgaattccccttgccaccccaccctccctggagtgtggctgaggaggcctccatctcatgtatcatctggataggagcctgctggtcacagcctcctctgtctgcccttcaccccagtggccactcagcttcctacccacacctctgccagaagatcccctcaggactgcaacaggcttgtgcaacaataaatgttggcttggaaaaaaaaaaaa

SEQ ID NO: 49 - DNA, 309 bp, HUMAN
atggcaggacaagcgtttagaaagtttcttccactctttgaccgagtattggttgaaaggagtgctgctgaaactgtaaccaaaggaggcattatgcttccagaaaaatctcaaggaaaagtattgcaagcaacagtagtcgctgttggatcgggttctaaaggaaagggtggagagattcaaccagttagcgtgaaagttggagataaagttcttctcccagaatatggaggcaccaaagtagttctagatgacaaggattatttcctatttagagatggtgacattcttggaaagtacgtagactga

SEQ ID NO: 50 - DNA, 1838 bp, HUMAN
aattcttcacctcttttctcagctccctgcagcatgggtgctgggccctccttgctgctcgccgccctcctgctgcttctctccggcgacggcgccgtgcgctgcgacacacctgccaactgcacctatcttgacctgctgggcacctgggtcttccaggtgggctccagcggttcccagcgcgatgtcaactgctcggttatgggaccacaagaaaaaaaagtagtggtgtaccttcagaagctggatacagcatatgatgaccttggcaattctggccatttcaccatcatttacaaccaaggctttgagattgtgttgaatgactacaagtggtttgccttttttaagtataaagaagagggcagcaaggtgaccacttactgcaacgagacaatgactgggtgggtgcatgatgtgttgggccggaactgggcttgtttcaccggaaagaaggtgggaactgcctctgagaatgtgtatgtcaacacagcacaccttaagaattctcaggaaaagtattctaataggctctacaagtatgatcacaactttgtgaaagctatcaatgccattcagaagtcttggactgcaactacatacatggaatatgagactcttaccctgggagatatgattaggagaagtggtggccacagtcgaaaaatcccaaggcccaaacctgcaccactgactgctgaaatacagcaaaagattttgcatttgccaacatcttgggactggagaaatgttcatggtatcaattttgtcagtcctgttcgaaaccaagcatcctgtggcagctgctactcatttgcttctatgggtatgctagaagcgagaatccgtatactaaccaacaattctcagaccccaatcctaagccctcaggaggttgtgtcttgtagccagtatgctcaaggctgtgaaggcggcttcccataccttattgcaggaaagtacgcccaagattttgggctggtggaagaagcttgcttcccctacacaggcactgattctccatgcaaaatgaaggaagactgctttcgttattactcctctgagtaccactatgtaggaggtttctatggaggctgcaatgaagccctgatgaagcttgagttggtccatcatgggcccatggcagttgcttttgaagtatatgatgacttcctccactacaaaaaggggatctaccaccacactggtctaagagaccctttcaacccctttgagctgactaatcatgctgttctgcttgtgggctatggcactgactcagcctctgggatggattactggattgttaaaaacagctggggcaccggctggggtgagaatggctacttccggatccgcagaggaactgatgagtgtgcaattgagagcatagcagtggcagccacaccaattcctaaattgtagggtatgccttccagtatttcataatgatctgcatcagttgtaaaggggaattggtatattcacagactgtagactttcagcagcaatctcagaagcttacaaatagatttccatgaagatatttgtcttcagaattaaaactgcccttaattttaatatacctttcaatcggccactggccatttttttctaagtattcaattaagtgggaattttctggaagatggtcagctatgaagtaatagagtttgcttaatcatttgtaattcaaacatgctatattttttaaaatcaatgtgaaaacatagacttatttttaaattgtaccaatcacaagaaaataatggcaataattatcaaaacttttaaaatagatgctcatatttttaaaataaagttttaaaaataactgc

SEQ ID NO: 51 - DNA, 2306 bp, HUMAN
aagagacaagaggtgccttgtgggcagatagggggctgggagggggcctgcccggaagcagtggtggcccgtggcaggcttctcactgggtaggaccgggccctctgttgcaccccctcaccctgctctctgccctcaggagtggctaagcaggttcggttacctgcccccggctgaccccacaacagggcagctgcagacgcaagaggagctgtctaaggccatcacagccatgcagcagtttggtggcctggaggccaccggcatcctggacgaggccaccctggccctgatgaaaaccccacgctgctccctgccagacctccctgtcctgacccaggctcgcaggagacgccaggctccagcccccaccaagtggaacaagaggaacctgtcgtggagggtccggacgttcccacgggactcaccactggggcacgacacggtgcgtgcactcatgtactacgccctcaaggtctggagcgacattgcgcccctgaacttccacgaggtggcgggcagcaccgccgacatccagatcgacttctccaaggccgaccataacgacggctaccccttcgacggccccggcggcaccgtggcccacgccttcttccccggccaccaccacaccgccggggacacccactttgacgatgacgaggcctggaccttccgctcctcggatgcccacgggatggacctgtttgcagtggctgtccacgagtttggccacgccattgggttaagccatgtggccgctgcacactccatcatgcggccgtactaccagggcccggtgggtgacccgctgcgctacgggctcccctacgaggacaaggtgcgcgtctggcagctgtacggtgtgcgggagtctgtgtctcccacggcgcagcccgaggagcctcccctgctgccggagcccccagacaaccggtccagcgccccgcccaggaaggacgtgccccacagatgcagcactcactttgacgcggtggcccagatccggggtgaagctttcttcttcaaaggcaagtacttctggcggctgacgcgggaccggcacctggtgtccctgcagccggcacagatgcaccgcttctggcggggcctgccgctgcacctggacagcgtggacgccgtgtacgagcgcaccagcgaccacaagatcgtcttctttaaaggagacaggtactgggtgttcaaggacaataacgtagaggaaggatacccgcgccccgtctccgacttcagcctcccgcctggcggcatcgacgctgccttctcctgggcccacaatgacaggacttatttctttaaggaccagctgtactggcgctacgatgaccacacgaggcacatggaccccggctaccccgcccagagccccctgtggaggggtgtccccagcacgctggacgacgccatgcgctggtccgacggtgcctcctacttcttccgtggccaggagtactggaaagtgctggatggcgagctggaggtggcacccgggtacccacagtccacggcccgggactggctggtgtgtggagactcacaggccgatggatctgtggctgcgggcgtggacgcggcagaggggccccgcgcccctccaggacaacatgaccagagccgctcggaggacggttacgaggtctgctcatgcacctctggggcatcctctcccccgggggccccaggcccactggtggctgccaccatgctgctgctgctgccgccactgtcaccaggcgccctgtggacagcggcccaggccctgacgctatgacacacagcgcgagcccatgagaggacagaggcggtgggacagcctggccacagagggcaaggactgtgccggagtccctgggggaggtgctggcgcgggatgaggacgggccaccctggcaccggaaggccagcagagggcacggcccgccagggctgggcaggctcaggtggcaaggacggagctgtcccctagtgagggactgtgttgactgacgagccgaggggtggccgctccagaagggtgcccagtcaggccgcaccgccgccagcctcctccggccctggagggagcatctcgggctgggggcccacccctctctgtgccggcgccaccaaccccacccacactgctgcctggtgctcccgccggcccacagggcctccgtccccaggtccccagtggggcagccctccccacagacgagccccccacatggtgccgcggcacgtcccccctgtgacgcgttccagaccaacatgacctctccctgctttgtagcggcccggaattc

SEQ ID NO: 52 - DNA, 1932 bp, HUMAN
cagcgagccgcagcgcaatcccggcgctcgcccaaggaccctggaagctaccgttaccccgccggcagcgtgggcgccatgagcagctcgggactgaattcggagaaggtagctgctctgatacagaaactgaattccgacccccagttcgtacttgcccagaatgtcgggaccacccacgacctgctggacatctgtctgaagcgggccacggtgcagcgcgcgcagcatgtgttccagcacgccgtgccccaggagggcaagccaatcaccaaccagaagagctcagggcgatgctggatcttttcttgtctgaatgttatgaggcttccattcatgaaaaagttaaatattgaagaatttgagtttagccaatcttacctgtttttttgggacaaggttgaacgctgttatttcttcttgagtgcttttgtggacacagcccagagaaaggagcctgaggatgggaggctggtgcagtttttgcttatgaaccctgcaaatgatggtggccaatgggatatgcttgttaatattgttgaaaaatatggtgttatccctaagaaatgcttccctgaatcttatacaacagaggcaaccagaaggatgaatgatattctgaatcacaagatgagagaattctgtatacgactgcggaacctggtacacagtggagcaaccaaaggagaaatctcggccacacaggacgtcatgatggaggagatattccgagtggtgtgcatctgtttgggtaatccaccagagacattcacctgggaatatcgagacaaagataaaaattatcagaaaattggccccataacacccttggagttttacagggaacatgtcaagccactcttcaatatggaagataagatttgtttagtgaatgaccctaggccccagcacaagtacaacaaactttacacagtggaatacttaagcaatatggttggtgggagaaaaactctatacaacaaccagcccattgacttcctgaaaaagatggttgctgcctccatcaaagatggagaggctgtgtggtttggctgtgatgttggaaaacacttcaatagcaagctgggcctcagtgacatgaatctctatgaccatgagttagtgtttggtgtctccttgaagaacatgaataaagcggagaggctgacttttggtgagtcacttatgacccacgccatgaccttcactgctgtctcagagaaggatgatcaggatggtgctttcacaaaatggagagtggagaattcatggggtgaagaccatggccacaaaggttacctgtgcatgacagatgagtggttctctgagtatgtctacgaagtggtggtggacaggaagcatgtccctgaagaggtgctagctgtgttagagcaggaacccattatcctgccagcatgggaccccatgggagctttggctgagtgatactgccctccagctctttcctccttccatggaacctgacgtagctgcaaaggacagatccagggactgaagccaaagttatgcaagggactgtgtgttgccacaggacacagtcagatttccagtctccaccaggaacctcttcagaaagtgtgctttatgctgaaacagaatactgttaaaggaaaaaaaagaggggggaagatcaggtcatactatctactctcctcatctctaacagctcaggatctcttagcattttaattagatgtaattgtttgtctttaactgtcaaaaagtttggttctgtgtctgtgttttaataagacgagaggacgagcgattgaggtgtatggagagaaaacagacctaatgctccttgttcctagagtagagtggagggagggtggcctaagagttgagctctcggaactgcatgctgctggacagtatcactgtctttcctagatggcagtcactgaattc

SEQ ID NO: 53 - DNA, 774 bp, HUMAN
  misc_feature (1)..(774): N=any base
cggcacgagggtgctgcttgtgtgctcgtttggtgcggacctggtacctcttyttgtgaagcggcagctgaggagactccggcgctcgccatggccgacgaaaagcccaaggaaggagtcaagactgagaacaacgatcatattaatttgaaggtggcggggcaggatggttctgtggtgcagtttaagattaagaggcatacaccacttagtaaactaatgaaagcctattgtgaacgacagggattgtcaatgaggcagatcagattccgatttgacgggcaaccaatcaatgaaacagacacacctgcacagttggaaatggaggatgaagatacaattgatgtgttccaacagcagacgggaggtgtctactgaaaagggaacctgcttctttactccagaactctgttctttaaagaccaagattacattctcaattagaaaactgcaatttggttccaccacatcctgactactaccgtatagttttctctattctttcatttcccccttccccattcctttattgtacataaagtaactggtatatgtgcacaagcatattgcattttttttttttttaactaaacagccaatggtatgttttgattgacatccaagtggagacggggatggggaaaaatactgattctgtggaaaatacccccctttctcccattagtggncatgctccattcagcccttaaacctttataatcccaggtaaggtaatttngcccncaccggttttacccaaaaaaaaaaaaactt

SEQ ID NO: 54 - DNA, 723 bp, HUMAN
gtgtactattagccatggtcaaccccaccgtgttcttcgacattgccgtcgacggcgagcccttgggccgcgtctcctttgagctgtttgcagacaaggtcccaaagacagcagaaaattttcgtgctctgagcactggagagaaaggatttggttataagggttcctgctttcacagaattattccagggtttatgtgtcagggtggtgacttcacacgccataatggcactggtggcaagtccatctatggggagaaatttgaagatgagaacttcatcctaaagcatacgggtcctggcatcttgtccatggcaaatgctggacccaacacaaatggttcccagtttttcatctgcactgccaagactgagtggttggatggcaagcatgtggtgtttggcaaagtgaaagaaggcatgaatattgtggaggccatggagcgctttgggtccaggaatggcaagaccagcaagaagatcaccattgctgactgtggacaactcgaataagtttgacttgtgttttatcttaaccaccagatcattccttctgtagctcaggagagcacccctccaccccatttgctcgcagtatcctagaatctttgtgctctcgctgcagttccctttgggttccatgttttccttgttccctcccatgcctagctggattgcagagttaagtttatgattatgaaataaaaactaaataacaattgtc

SEQ ID NO: 55 - DNA, 1291 bp, HUMAN
gctctttccaacgctgtaaaaaaggacagaggctgttccctatggcagaaggcaaccacagaaaaaagccacttaaggtgttggaatccctgggcaaagatttcctcactggtgttttggataacttggtggaacaaaatgtactgaactggaaggaagaggaaaaaaagaaatattacgatgctaaaactgaagacaaagttcgggtcatggcagactctatgcaagagaagcaacgtatggcaggacaaatgcttcttcaaaccttttttaacatagaccaaatatcccccaataaaaaagctcatccgaatatggaggctggaccacctgagtcaggagaatctacagatgccctcaagctttgtcctcatgaagaattcctgagactatgtaaagaaagagctgaagagatctatccaataaaggagagaaacaaccgcacacgcctggctctcatcatatgcaatacagagtttgaccatctgcctccgaggaatggagctgactttgacatcacagggatgaaggagctacttgagggtctggactatagtgtagatgtagaagagaatctgacagccagggatatggagtcagcgctgagggcatttgctaccagaccagagcacaagtcctctgacagcacattcttggtactcatgtctcatggcatcctggagggaatctgcggaactgtgcatgatgagaaaaaaccagatgtgctgctttatgacaccatcttccagatattcaacaaccgcaactgcctcagtctgaaggacaaacccaaggtcatcattgtccaggcctgcagaggtgcaaaccgtggggaactgtgggtcagagactctccagcatccttggaagtggcctcttcacagtcatctgagaacctggaggaagatgctgtttacaagacccacgtggagaaggacttcattgctttctgctcttcaacgccacacaacgtgtcctggagagacagcacaatgggctctatcttcatcacacaactcatcacatgcttccagaaatattcttggtgctgccacctagaggaagtatttcggaaggtacagcaatcatttgaaactccaagggccaaagctcaaatgcccaccatagaacgactgtccatgacaagatatttctacctctttcctggcaattgaaaatggaagccacaagcagcccagccctccttaatcaacttcaaggagcaccttcattagtacagcttgcatatttaacattttgtatttcaataaaagtgaagacaaaaaaaaaa

SEQ ID NO: 56 - DNA, 1552 bp, HUMAN
ccgccgccgcgcatgggctgcctcggaacgagtaagaccgaggaccagcgcaacgaggagaaggcgcagcgtgaggccaacaaaaagatcgagaagcagctgcagaaggacaagcaggtctaccgggccacgcaccgcctgctgctgctgggtgctggagaatctggtaaaagcaccattgtgaagcagatgaggatcctgcatgttaatgggtttaatggagagggcggcgaagaggacccgcaggctgcaaggagcaacagcgatggtgagaaggcaaccaaagtgcaggacatcaaaaacaacctgaaagaggcgattgaaaccattgtggccgccatgagcaacctggtgccccccgtggagctggccaaccccgagaaccagttcagagtggactacatcctgagtgtgatgaacgtgcctgactttgacttccctcccgaattctatgagcatgccaaggctctgtgggaggatgaaggagtgcgtgcctgctacgaacgctccaacgagtaccagctgattgactgtgcccagtacttcctggacaagatcgacgtgatcaagcaggctgactatgtgccgagcgatcaggacctgcttcgctgccgtgtcctgacttctggaatctttgagaccaagttccaggtggacaaagtcaacttccacatgtttgacgtgggtggccagcgcgatgaacgccgcaagtggatccagtgcttcaacgatgtgactgccatcatcttcgtggtggccagcagcagctacaacatggtcatccgggaggacaaccagaccaaccgcctgcaggaggctctgaacctcttcaagagcatctggaacaacagatggctgcgcaccatctctgtgatcctgttcctcaacaagcaagatctgctcgctgagaaagtccttgctgggaaatcgaagattgaggactactttccagaatttgctcgctacactactcctgaggatgctactcccgagcccggagaggacccacgcgtgacccgggccaagtacttcattcgagatgagtttctgaggatcagcactgccagtggagatgggcgtcactactgctaccctcatttcacctgcgctgtggacactgagaacatccgccgtgtgttcaacgactgccgtgacatcattcagcgcatgcaccttcgtcagtacgagctgctctaagaaggaacccccaaatttaattaaagccttaagcacaattaattaaaagtgaaacgtaattgtacaagcagttaatcacccaccatagggcatgattaacaaagcaacctttcccttcccccgagtgattttgcgaaacccccttttcccttcagcttgcttagatgttccaaatttagaagcttaaggcggcctacagaaaaaggaaaaaaggccacaaaagttccctctcactttcagtaaaaataaataaaacagcagcagcaaacaaataaaatgaaataaaagaaacaaatgaaataaatattgtgttgtgcagcattaaaaaaaatcaaaataaaaattaaatgtgagc

SEQ ID NO: 57 - DNA, 1106 bp, HUMAN
ttgctgaaataaaacacaagtatctctggtcagagcctcagaattgctcagccaccaaaagtaactaccttcgaggtactggtccctacccaccttccgtggactggcggaaaaaaggaaattttgtctcacctgtgaaaaatcagggtgcctgcggcagttgctggactttctccaccactggggccctggagtctgcaatcgccatcgcaaccggaaagatgctgtccttggcggaacagcagctggtggactgcgcccaggacttcaataattacggctgccaagggggtctccccagccaggctttcgagtatatcctgtacaacaaggggatcatgggtgaagacacctacccctaccagggcaaggatggttattgcaagttccaacctggaaaggccatcggctttgtcaaggatgtagccaacatcacaatctatgacgaggaagcgatggtggaggctgtggccctctacaaccctgtgagctttgcctttgaggtgactcaggacttcatgatgtatagaacgggcatctactccagtacttcctgccataaaactccagataaagtaaaccatgcagtactggctgttgggtatggagaaaaaaatgggatcccttactggatcgtgaaaaactcttggggtccccagtggggaatgaacgggtacttcctcatcgagcgcggaaagaacatgtgtggcctggctgcctgcgcctcctaccccatccctctggtgtgagccgtggcagccgcagcgcagactggcggagaaggagaggaacgggcagcctgggcctgggtggaaatcctgccctggaggaagttgtggggagatccactgggacccccaacattctgccctcacctctgtgcccagcctggaaacctacagacaaggaggagttccaccatgagctcacccgtgtctatgacgcaaagatcaccagccatgtgccttagtgtccttcttaacagactcaaaccacatggaccacgaatattctttctgtccagaagggctactttccacatatagagctccagggactgtcttttctgtattcgctgttcaataaacattgagtgagcacctcca

SEQ ID NO: 58 - DNA, 725 bp, HUMAN
ctaacccagaaacatccaattctcaaactgaagctcgcactctcgcctccagcatgaaagtctctgccgcccttctgtgcctgctgctcatagcagccaccttcattccccaagggctcgctcagccagatgcaatcaatgccccagtcacctgctgttataacttcaccaataggaagatctcagtgcagaggctcgcgagctatagaagaatcaccagcagcaagtgtcccaaagaagctgtgatcttcaagaccattgtggccaaggagatctgtgctgaccccaagcagaagtgggttcaggattccatggaccacctggacaagcaaacccaaactccgaagacttgaacactcactccacaacccaagaatctgcagctaacttattttcccctagctttccccagacaccctgttttattttattataatgaattttgtttgttgatgtgaaacattatgccttaagtaatgttaattcttatttaagttattgatgttttaagtttatctttcatggtactagtgttttttagatacagagacttggggaaattgcttttcctcttgaaccacagttctacccctgggatgttttgagggtctttgcaagaatcattaatacaaagaattttttttaacattccaatgcattgctaaaatattattgtggaaatgaatattttgtaactattacaccaaataaatatatttttgtac

SEQ ID NO: 59 - DNA, 2019 bp, HUMAN
acgtgtatcgctgccgtcaagatggaggggcctttgtccgtgttcggtgaccgcagcactggggaaacgatccgctcccaaaacgttatggctgcagcttcgattgccaatattgtaaaaagttctcttggtccagttggcttggataaaatgttggtggatgatattggtgatgtaaccattactaacgatggtgcaaccatcctgaagttactggaggtagaacatcctgcagctaaagttctttgtgagctggctgatctgcaagacaaagaagttggagatggaactacttcagtggttattattgcagcagaactcctaaaaaatgcagatgaattagtcaaacagaaaattcatcccacatcagttattagtggctatcgacttgcttgcaaggaagcagtgcgttatatcaatgaaaacctaattgttaacacagatgaactgggaagagattgcctgattaatgctgctaagacatccatgtcttccaaaatcattgggataaatggtgatttctttgctaacatggtagtagatgctgtacttgctattaaatacacagacataagaggccagccacgctatccagtcaactctgttaatattttgaaagcccatgggagaagtcaaatggagagtatgctcatcagtggctatgcactcaactgtgtggtgggatcccagggcatgcccaagagaatcgtaaatgcaaaaattgcttgccttgacttcagcctgcaaaaaacaaaaatgaagcttggtgtacaggtggtcattacagaccctgaaaaactggaccaaattagacagagagaatcagatatcaccaaggagagaattcagaagatcctggcaactggtgccaatgttattctaaccactggtggaattgatgatatgtgtctgaagtattttgtggaggctggtgctatggcagttagaagagttttaaaaagggaccttaaacgcattgccaaagcttctggagcaactattctgtcaaccctggccaatttggaaggtgaagaaacttttgaagctgcaatgttgggacaggcagaagaagtggtacaggagagaatttgtgatgatgagctgatcttaatcaaaaatactaaggctcgtacgtctgcatcgattatcttacgtggggcaaatgatttcatgtgtgatgagatggagcgctctttacatgatgcactttgtgtagtgaagagagttttggagtcaaaatctgtggttcccggtgggggtgctgtagaagcagccctttccatataccttgaaaactatgcaaccagcatggggtctcgggaacagcttgcgattgcagagtttgcaagatcacttcttgttattcccaatacactagcagttaatgctgcccaggactccacagatctggttgcaaaattaagagcttttcataatgaggcccaggttaacccagaacgtaaaaatctaaaatggattggtcttgatttgagcaatggtaaacctcgagacaacaaacaagcaggggtgtttgaaccaaccatagttaaagttaagagtttgaaatttgcaacagaagctgcaatcaccattcttcgaattgatgatcttattaaattacatccagaaatccttcggattaaacatggaagttatgaagatgctgttcactctggagcccttaatgattgatctgatgttccttttatttataacaatgttaaatgcaatgtcttgtaccttgagttgagtattacacattaaagtaaagtacaagctgtaaacttgggtttttgtgatgtaggaaatggtttccatctgtactttggtcctctgatttcagatattgcaacctagtactttattagtttaaaaagaaattgaggttgttcaaagtttaagcaattcattctctctgaacacacattgctattcccatcccacccccaatgcacagggctgcaacaccacgacttctgcccattctctccagtgtgtgtaacagggtcacaagaattc

SEQ ID NO: 60 - DNA, 3016 bp, HUMAN
gaattcgggtgagccagctccgggagaacagcatgtacaccagcctcagtgttacagagtgtgggtacatcaaggtgaatggtgagcagaaactataacctgttagtccttctacacctcatctgctacaagttctggcttagacatggatattctttgtgaagaaaatacttctttgagctcaactacgaactccctaatgcaattaaatgatgacaccaggctctacagtaatgactttaactctggagaagctaacacttctgatgcatttaactggacagtcgactctgaaaatcgaaccaacctttcctgtgaagggtgcctctcaccgtcgtgtctctccttacttcatctccaggaaaaaaactggtctgctttactgacagccgtagtgattattctaactattgctggaaacatactcgtcatcatggcagtgtccctagagaaaaagctgcagaatgccaccaactatttcctgatgtcacttgccatagctgatatgctgctgggtttccttgtcatgcccgtgtccatgttaaccatcctgtatgggtaccggtggcctctgccgagcaagctttgtgcagtctggatttacctggacgtgctcttctccacggcctccatcatgcacctctgcgccatctcgctggaccgctacgtcgccatccagaatcccatccaccacagccgcttcaactccagaactaaggcatttctgaaaatcattgctgtttggaccatatcagtaggtatatccatgccaataccagtctttgggctacaggacgattcgaaggtctttaaggaggggagttgcttactcgccgatgataactttgtcctgatcggctcttttgtgtcatttttcattcccttaaccatcatggtgatcacctactttctaactatcaagtcactccagaaagaagctactttgtgtgtaagtgatcttggcacacgggccaaattagcttctttcagcttcctccctcagagttctttgtcttcagaaaagctcttccagcggtcgatccatagggagccagggtcctacacaggcaggaggactatgcagtccatcagcaatgagcaaaaggcatgcaaggtgctgggcatcgtcttcttcctgtttgtggtgatgtggtgccctttcttcatcacaaacatcatggccgtcatctgcaaagagtcctgcaatgaggatgtcattggggccctgctcaatgtgtttgtttggatcggttatctctcttcagcagtcaacccactagtctacacactgttcaacaagacctataggtcagccttttcacggtatattcagtgtcagtacaaggaaaacaaaaaaccattgcagttaattttagtgaacacaataccggctttggcctacaagtctagccaacttcaaatgggacaaaaaaagaattcaaagcaagatgccaagacaacagataatgactgctcaatggttgctctaggaaagcagcattctgaagaggcttctaaagacaatagcgacggagtgaatgaaaaggtgagctgtgtgtgataggctagttgccgtggcaactgtggaaggcacactgagcaagttttcacctatctggaaaaaaaaaatatgagattggaaaaaattagacaagtctagtggaaccaacgatcatatctgtatgcctcattttattctgtcaatgaaaagcggggttcaatgctacaaaatgtgtgcttggaaaatgttctgacagcatttcagctgtgagctttctgatacttatttataacattgtaaatgatatgtctttaaaatgattcacttttattgtataattatgaagccctaagtaaatctaaattaacttctattttcaagtggaaaccttgctgctatgctgttcattgatgacatgggattgagttggttacctattgccgtaaataaaaatagctataaatagtgaaaattttattgaatataatggcctcttaaaaattatctttaaaacttactatggtatatattttgaaaggagaaaaaaaaaaagccactaaggtcagtgttataaaatctgtattgctaagataattaaatgaaatacttgacaacatttttcatagataccattttgaaatattcacaaggttgctggcatttgctgcatttcaagttaattctcagaagtgaaaaagacttcaaatgttattcaataactattgctgctttctcttctacttcttgtgctttactctgaatttccagtgtggtcttgtttaatatttgttcctctaggtaaactagcaaaaggatgatttaacattaccaaatgcctttctagcaattgcttctctaaaacagcactatcgaggtatttggtaacttgctgtgaaatgactgcatcatgcatgcactcttttgagcagtaaatgtatattgatgtaactgtgtcaggattgaggatgaactcaggtttccggctactgacagtggtagagtcctaggacatctctgtaaaaagcaggtgactttcctatgacactcatcaggtaaactgatgctttcagatccatcggtttatactatttattaaaaccattctgcttggttccacaatcatctattgagtgtacatttatgtgtgaagcaaatttctagatatgagaaatataaaaataattaaaacaaaatccttgccttcaaacgaaatggctcggccaggcacggaggctcgtgcatgtaatcctagcactttgggaggctgagatgggaggatcacttgaggccaagagtttgagaccaacctgggtaacaaagtgagacctccctgtctctacaaaaaaaatcaaaaaattatctgatccttgtggcacacaactgtggtcccagctacaggggaggctgagacgcaaggatcacttgagcccagaagctcaaggctgcagtgagccaagttcacaccactgccatttcctcctgggcaacagagtgagaccctatcaccccgaattc

SEQ ID NO: 61 - DNA, 4131 bp, HUMAN
tcaagctcgccccgcgcagcccgagccgggctgggcgctgtcctcgggggcctggggaaccgcgcggtttggagatcggaggcacctggaacccgtggcaagcgccgagccgggagacagcccgaggaaccacgggttctggagctaggagccggaagctgggagtccggaggagagcggagcccggagcccggagcccggggcggcgcgtctgggtctggcgcttcccgactggacggcgcgcccgctggtcttcgccacgcgccctcccctgggctcgcgttcatcggtccccgcctgagacgcgcccactcctgcccggacttccagccccggaggcgccggacagagccgcggactccagcgcccaccatgcgcctcaacagctccgcgccgggaaccccgggcacgccggccgccgaccccttccagcgggcgcaggccggactggaggaggcgctgctggccccgggcttcggcaacgcttcgggcaacgcgtcggagcgcgtcctggcggcacccagcagcgagctggacgtgaacaccgacatctactccaaagtgctggtgaccgccgtgtacctggcgctcttcgtggtgggcacggtgggcaacacggtgacggcgttcacgctggcgcggaagaagtcgctgcagagcctgcagagcacggtgcattaccacctgggcagcctggcgctgtccgacctgctcaccctgctgctggccatgcccgtggagctgtacaacttcatctgggtgcaccacccctgggccttcggcgacgccggctgccgcggctactacttcctgcgcgacgcctgcacctacgccacggccctcaacgtggccagcctgagtgtggagcgctacctggccatctgccaccccttcaaggccaagaccctcatgtcccgaagccgcaccaagaagttcatcagcgccatctggctcgcctcggccctgctgacggtgcctatgctgttcaccatgggcgagcagaaccgcagcgccgacggccagcacgccggcggcctggtgtgcacccccaccatccacactgccaccgtcaaggtcgtcatacaggtcaacaccttcatgtccttcatattccccatggtggtcatctcggtcctgaacaccatcatcgccaacaagctgaccgtcatggtacgccaggcggccgagcagggccaagtgtgcacggtcgggggcgagcacagcacattcagcatggccatcgagcctggcagggtccaggccctgcggcacggcgtgcgcgtcctacgtgcagtggtcatcgcctttgtggtctgctggctgccctaccacgtgcggcgcctcatgttctgctacatctcggatgagcagtggactccgttcctctatgacttctaccactacttctacatggtgaccaacgcactcttctacgtcagctccaccatcaaccccatcctgtacaacctcgtctctgccaacttccgccacatcttcctggccacactggcctgcctctgcccggtgtggcggcgcaggaggaagaggccagccttctcgaggaaggccgacagcgtgtccagcaaccacaccctctccagcaatgccacccgcgagacgctgtactaggctgtgcgccccggaacgtgtccaggaggagcctggccatgggtccttgcccccgacagacagagcagcccccacccgggagccttgatgggggtcaggcagaggccagcctgcactggagtctgaggcctgggacccccccctcccaccccctaacccatgtttctcattagtgtctcccgggcctgtccccaactcctccccacccctcccccatctcctctttgaaagccagaacaagagagcgctcctctcccagataggaaaagggcctctaacaaggagaaattagtgtgcggcaaaaggcagttttctttgttctcagactaatggatggttccagagaaggaaatgaaatgtgctgggtggggccgggcctccggcggcccggctgctgttcccatgtccacatctctgaggcctgcaccccctctgtctagctcggggagtccagccccagtcccgcaggctccgtggctttgggcctcacgtgcagaccctgccatgcagacccatgcccccctcccccaggcagctccaagaaagctccctgactcgccccttcaggcctggcaagctgggggcccatcgccgtggggagtccctcccaccaccctcgccgcaggcagctgcagcccccagaggggaccacaagcccaaaaaggacaaaaatgggctggcctggaatggcccagaccccagcctcccctcctccctcccatcctcacccaggccaaggcccaggggctctgccaggacaccacatgggagggggctcaggcctcagcctcaagatcttcagctgtggcctctcgggctcggcagaagggacgccggatcaggggcctggtctccagcacctgcccgagtggccgtggccaggatggggtgcgcattccgtgtgctttgcttgtagctgtgcaggctgaggtctggagccaggcccagagctggcttcagggtggggccttgagaaggggaatgtgggacaggggcgatggtgcctggtctctgagtaagatgccaggtcccaggaactcaggcttcaggtgagaaggagcggtgtgtccaggcaccgctggccggcagccctgggctgaggcacagactcatttgtcaccttctggcggcggcagccctggccccggcctccaagcagttgaaaaagctggcgcctccttggtctctaggatccaggctccacagagcacatgactagccaggcccctggcttaagaaggtcgcctaagcctaagagaagacagtcccaggagaagctggccgggaccagccaggagctgggagccacaggaagcaaaagtcagccttttcttcaagggatttccctgtctcagagcagcctttgccccagggaaatgggctctgggctggctgcctgcaccggccatgtcgacccaggacccggacacctggtcttgggctgtgttcagccactttgccttctctggactcagtttccccgtctgagaaatgagagtcgaatgctacagtatctgcagtcgcttggatctggctgttgagttgacgggttccttgaaccccacaaaatccctctccaaccacaggacccttcggctcaccaagaacggggcccaggggagtcaggcctattcgctgcacttcctgccaaactttgcccccacaagcctggtcatcagccaggcagccctcccagtgcccaagggccaccaaccccagggaaacagggccagcacagaggggccttcctcccccacagagctcccatgacatagtctgctctgggcggaagagctttgctgccagccagggatgtccagaggtcggtgcagcccctatccctgctcaggagtgggctcagagtctagcaaatgctaaggcccctcaggctgggctctgaacgaggacctggactcagagccagacagggcagcctcagacccttctctggggctcctggaccttgggccataatttctgagcctcggtttccccatctaaggaacagatgtggtcgttccgccctctcagctggatgagactgtcctggaggatccaccccggaacagacagaacggtgtctctcaggatggtgctctgagagagggcagagtggatgccccactgccctagaccctcggtagacgtggggtctctggggcggggtctgtggctgtgactgaagtcggctttcccgttgatgtcttgatgctcctatctgtgcacttaccgtaggtagggacacgtgtccatgcaccacagacacacccacgacacctgatctcgtatcactagcttgcggccaggtcatgatgtggccccggaagctggccctgcgtgccatgagtgcgtcggtcatggagtccggagcccctgagccggcccctggtgacggcacagccctcacagctcaaacgcccacccccactcccaccatctgcaggtggtgaaaacaaaccccgtgtatctctcaataaaggtggccgaagggcctcgatgtgg

SEQ ID NO: 62 - DNA, 3536 bp, HUMAN
tgaagtctcttcccaagcaaatgggagcttctttggaccttggagcacacagaggattctactttctttaaaactttgttttcaggcaatttccctgagaaccgtttacttccagaagattggtggagcttgatctgaaggctggccatgaaatctcaaggtcaacattggtattccagttcagataaaaactgtaaagtgagctttcgtgagaagcttctgattattgattcaaacctgggggtccaagatgtggagaacctcaagtttctctgcataggattggtccccaacaagaagctggagaagtccagctcagcctcagatgtttttgaacatctcttggcagaggatctgctgagtgaggaagaccctttcttcctggcagaactcctctatatcatacggcagaagaagctgctgcagcacctcaactgtaccaaagaggaagtggagcgactgctgcccacccgacaaagggtttctctgtttagaaacctgctctacgaactgtcagaaggcattgactcagagaacttaaaggacatgatcttccttctgaaagactcgcttcccaaaactgaaatgacctccctaagtttcctggcatttctagagaaacaaggtaaaatagatgaagataatctgacatgcctggaggacctctgcaaaacagttgtacctaaacttttgagaaacatagagaaatacaaaagagagaaagctatccagatagtgacacctcctgtagacaaggaagccgagtcgtatcaaggagaggaagaactagtttcccaaacagatgttaagacattcttggaagccttaccgagggcagctgtgtacaggatgaatcggaaccacagaggcctctgtgtcattgtcaacaaccacagctttacctccctgaaggacagacaaggaacccataaagatgctgagatcctgagtcatgtgttccagtggcttgggttcacagtgcatatacacaataatgtgacgaaagtggaaatggagatggtcctgcagaagcagaagtgcaatccagcccatgccgacggggactgcttcgtgttctgtattctgacccatgggagatttggagctgtctactcttcggatgaggccctcattcccattcgggagatcatgtctcacttcacagccctgcagtgccctagactggctgaaaaacctaaactctttttcatccaggcctgccaaggtgaagagatacagccttccgtatccatcgaagcagatgctctgaaccctgagcaggcacccacttccctgcaggacagtattcctgccgaggctgacttcctacttggtctggccactgtcccaggctatgtatcctttcggcatgtggaggaaggcagctggtatattcagtctctgtgtaatcatctgaagaaattggtcccaagacatgaagacatcttatccatcctcactgctgtcaacgatgatgtgagtcgaagagtggacaaacagggaacaaagaaacagatgccccagcctgctttcacactaaggaaaaaactagtattccctgtgcccctggatgcactttcaatatagcagagagtttttgttggttcttagacctcaaacgaatcattgggtataacctccagcctcctgcccagcacaggaatcggtggtctccacctgtcattctagaaacaggaaacaccgtgttttctgacacagtcaattctgattttctttttcttttgcaagtctaaatgttagaaaactttctttttttggagatagtctcattctgtcacccagactggagtgcaggggggcaatcacggctcactgtagtctcgacctcccaggctcaagctgtcctcccacctcagcctcccaagtagctgagactacaggtgtgtgtccatgcacagctaactttttattttttttgtggagatggggtttcactatgttgcctaagctggtctcaaactcctgggctcaagcgatcctcccacctcagcttctcaaagttctgggactacaggcatgaaatactgtgcctggcctggggaccaggtgcattttaaggttccttggtgttcaaaaaccacgttcttagcctagattgagcttagattgcctctctagacaactaccccttagttataattctgtgtcccctctgcatgcccttaaacattggacagtgaggtcacagtccacccaccctctctctgatctcccccttcctaagacttctcttttgcacatctagtgaggtgaaaatttggtctatgccaggcccatttcctgcttttgtgtaaggaaggtgctcacataggaagtttttatttggttagagacaggtttccctgtaggaagatgatggctcatttacactcagctgctctgcaagcagaaactttacaacctgatgtcatattccattttggactgggtgcggtgactcatgcctgtaatcccagtactctgggaagccaaggcaggcagatcacttgaggtcaggagttcgagaccagcctggccaatacggcaaaacctcatcattactaaaaacacaaaaattagccaggtgtggcggcgagcacctgtaatcccagctactcgggaggctgagacaggagaatctcttgaatccaggaggcagaggctgtggtgagccaagatgacacaactgcactccagcttgggcaacagggcgagaccttgtttaaaaaaaaaattcaatattggggttggaacatttcagttgccattgacagaacacccaattcaaattgactgaagcaaagaagggaatttattgcctctttcacattgaaacccaggagtggataacactggcttcaggcaaagcttgaatcaggactcaatctacaggccagcacctttctcttggccggatgtcctcagggctggcagatgcagtagactgcagtggacagtccccaccttgttactgctactacactttgctcctctggcccaaggcatgaggagagaggctgtgtcagaaactgaagctgttctcaggatcactgggctcttcttggcagaggggatgtctggcttgcctgaagggagtggctctgtaaggacgccttgatgctttcttcattaagattttgagcatttttacgtacttgagcttttttttttttttttttcaatttctagaggaactttttctctgttaattcctggaactgtattttgaatccttaaaggtgagccctcatagggagatccaaagtcctgtggttaacgccttcatttatagatgaggcagctgaggcctggggatgtgaacaacctgctcacagtcctcatttactggatttgacttcagccaggtgaactggaatgccttggggcgtggaagggcattaggagtgtttcatttgatatgtgaatgctcataaaaaaatgtcaaggaatgaagaacaacaactctcagtggtgcctgcatttataattatttatgtgaaagtcaaattcatgtacagtaaatttgttataagaat

SEQ ID NO: 63 - DNA, 2040 bp, HUMAN
cacgaggagaacagaagaagagaaagctcagcaaattttcttgccatacttcatgacttcactgtggctaagtgtggggaccagacaggactcgtggagacatccaggtgctgaagccttcagctactgtctcagttttttgaagtttagcaatggcgtctttctctgctgagaccaattcaactgacctactctcacagccatggaatgagcccccagtaattctctccatggtcattctcagccttacttttttactgggattgccaggcaatgggctggtgctgtgggtggctggcctgaagatgcagcggacagtgaacacaatttggttcctccacctcaccttggcggacctcctctgctgcctctccttgcccttctcgctggctcacttggctctccagggacagtggccctacggcaggttcctatgcaagctcatcccctccatcattgtcctcaacatgtttgccagtgtcttcctgcttactgccattagcctggatcgctgtcttgtggtattcaagccaatctggtgtcagaatcatcgcaatgtagggatggcctgctctatctgtggatgtatctgggtggtggcttgtgtgatgtgcattcctgtgttcgtgtaccgggaaatcttcactacagacaaccataatagatgtggctacaaatttggtctctccagctcattagattatccagacttttatggagatccactagaaaacaggtctcttgaaaacattgttcagccgcctggagaaatgaatgataggttagatccttcctctttccaaacaaatgatcatccttggacagtccccactgtcttccaacctcaaacatttcaaagaccttctgcagattcactccctaggggttctgctaggttaacaagtcaaaatctgtattctaatgtatttaaacctgctgatgtggtctcacctaaaatccccagtgggtttcctattgaagatcacgaaaccagcccactggataactctgatgcttttctctctactcatttaaagctgttccctagcgcttctagcaattccttctacgagtctgagctaccacaaggtttccaggattattacaatttaggccaattcacagatgacgatcaagtgccaacacccctcgtggcaataacgatcactaggctagtggtgggtttcctgctgccctctgttatcatgatagcctgttacagcttcattgtcttccgaatgcaaaggggccgcttcgccaagtctcagagcaaaacctttcgagtggccgtggtggtggtggctgtctttcttgtctgctggactccataccacatttttggagtcctgtcattgcttactgacccagaaactcccttggggaaaactctgatgtcctgggatcatgtatgcattgctctagcatctgccaatagttgctttaatcccttcctttatgccctcttggggaaagattttaggaagaaagcaaggcagtccattcagggaattctggaggcagccttcagtgaggagctcacacgttccacccactgtccctcaaacaatgtcatttcagaaagaaatagtacaactgtgtgaaaatgtggagcagccaacaagcaggggctcttaggcaatcacatagtgaaagtttataagaggatgaagtgatatggtgagcagcggacttcaaaaactgtcaaagaatcaatccagcggttctcaaacggtacacagactattgacatcagcatcacctagaaacttgttagaaatgcaaattctcaagccgcatcccagacttgctgaatcggaatctctgggggttgggacccagcaagggcacttaacaaacccccgtttctgattaatgctaaatgtaagaatcattgtaaacattagttctatttctatcccaaactaagctatgtgaaataagagaagctactttgtttttaaatgatgttgaatatttgtcgatatttccatcattaaatttttccttagcattgtctaagtcaaaaaaaaaaaaaaaaaa

SEQ ID NO: 64 - DNA, 3923 bp, HUMAN
gagccagcgagccagcgcgcgcgggcgggcggacagatcggagccgagcggggccgggcggggcgctccctgcagggctctgcgcggcgtgccgcggcggccgcgggctccggccccgggccatgagcccctccgcgactcggcgctgagcccgccaccggtccagcgccccaggacccgccgccggctgccggcttgccgaagccccctcaggatcccctcaacaaggatggaactgaaggccgaggaggaggaggtgggtggcgtccagccggtgagcatccaggccttcgccagcagctccacactgcacggcctggcccacatcttctcctacgagcggctgtctctgaagcgggcactgtgggccctgtgcttcctgggctcgctggctgtgctgctgtgtgtgtgcacggagcgtgtgcagtactacttccactaccaccatgtcaccaagctcgacgaggtggctgcctctcagcttaccttccctgctgtcacgctgtgcaacctcaacgagttccgctttagccaagtctccaagaatgacctgtatcatgctggggagctgctggccctgctcaacaacaggtatgagataccagacacacagatggcagatgaaaagcagctggagatactgcaggacaaagccaacttccgcagcttcaaacccaaacccttcaacatgcgtgagttctacgaccgagctgggcacgacattcgagacatgctgctctcctgccacttccggggggaggtctgcagcgctgaagacttcaaggtggtcttcacacgctatggaaagtgctacacgttcaactcgggccgagatgggcggccgcggctgaagaccatgaaggatgggacgggcaatgggctggaaatcatgctggacatccagcaggacgagtacctgcctgtgtggggggagactgacgagacgtccttcgaagcaggcatcaaagtgcagatccatagtcaggatgaacctcctttcatcgaccagctgggctttggcgtggccccaggcttccagacctttgtggcctgccaggagcagcggctcatctacctgcccccaccctggggcacctgcaaagctgttaccatggactcggatttggatttcttcgactcctacagcatcactgcctgccgcatcgactgtgagacgcgctacctggtggagaactgcaactgccgcatggtgcacatgccaggggatgccccatactgtactccagagcagtacaaggagtgtgcagatcctgctctggacttcctggtggagaaggaccaggagtactgcgtgtgtgaaatgccttgcaacctgacccgctatggcaaagagctgtccatggtcaagatccccagcaaagcctcagccaagtacctggccaagaagttcaacaaatctgagcaatacataggggagaacatcctggtgctggacattttctttgaagtcctcaactatgagaccattgaacagaagaaggcctatgagattgcagggctcctgggtgagctgctgatgacacctgtccccttctcatgccatgggcatggcgtggctccctatcatccaaaagcagggtgctcacttctgtcccatgagggtcctccaccccagaggcccttccccaaaccctgttgtcttggtgacatcgggggccagatggggctgttcatcggggccagcatcctcacggtgctggagctctttgactacgcctacgaggtcattaagcacaagctgtgccgacgaggaaaatgccagaaggaggccaaaaggagcagtgcggacaagggcgtggccctcagcctggacgacgtcaaaagacacaacccgtgcgagagccttcggggccaccctgccgggatgacatacgctgccaacatcctacctcaccatccggcccgaggcacgttcgaggactttacctgctgagccccgcaggccgctgaaccaaaggcctagatggggaggactaggagagcgrgggggcccccagctgcctcctcacatctgccctgggractccccacactccggggcagatctttcctcttgtctgtggtaaggaaggagtcttgaccatagagtcctctctctgcctctatcccattcyttttacatttaacaaaactaatctaaaaaagaactaaaaagggagaacggggcaagggacctcaggctgcccctctctcctccatgctgcctcccctagctcccagcctgaattctgtctatctagctgtctgccatctgagtgtccatctacattctgctgccaccagtcaccaaaggcccttcccagtgaggggtggaagggatctctggggtctggaatttggccccaaaccagagaatgtaccttaagggggagggctagtgtgggggagggaggcttccccagccttaagagaccctctcagcccagtgactgtccccaaacccaagtctcctggcaggaactaaaacctcagccccactctctcacaccatgtggaatctcgtgggggtcggggatccccttaagaagtggtaatggggacaagatgcggccctggtgctgtaggctacatcctgatacctataagttcacccccaccccacagctgctggagagaaatcccaagaggcagcccttcctcaccatcccattaaagacckggctggttagcgtccagctcagggagaagggcgctagtgcctaacctcactggtccctctcccggaggcccttgtagagggccacgtccataaattttcttatggaactctcccacatcctcttccccaacttcatttgcttctctcaacaacctcatctgcattttctatttctatatgatacagactctatattgctatatctctgtatatactttcccagccctgtctgtctccaccccatcccctcttgtctctgagaaccattctcccaccccaagttccaccttctatgtttctactccctccctggtctctgaatgccttygcctgtataaagagttggactctctcccctggtgtctgtactgtgtacacacatccctctgagaagcacaaggagacgacacgcgcattgtaacctttgcactgtctcagtggcgacaaaggaagctgtgaatcacaagctctgcctctttctggcctcaccctctcccccaacccgggcaccctcggccctccctgcagccttaacattctcttcccctgctcctcctatcccattgccctctgcccagctgacagtggcatccccagggaaggggttgctgtagagatagcccccacccaggggatggaggtctaccctggacactaagccaagtgtgtcagagacagaagggagctggggattggcgactcctgaagttggggcagtgggatgctgacaggcagaagctgaggtcctcagtcagtggcctttcctccttctgggtgcccagccccctttcctcacctgatacccaagcccaccacttttattttctggtgaggtgggtttgggaggaaagagaggcctagaggaggagttgaaagctctgctgttgtctcaccctatcttaatgagagacaagtgaggtggagggcctgccccccctccctccaccagacactccttccaggcctgagccccaacccctcttcaggccttccttccctagctgtgtcttggtcttcaatcccagaacaggacctgtgagcagctgcattggcctggagctggagagtaaggctgtaggatctttggaatctcttggttcctaagagtttcctcagagatcatacctccccagagggaagcaggaatgaggccaaaaagtgtgcattggataggggaacagcaggcagggctctgggtgacgcatgcctctggtctaataaactgggtttcaaccaaaaaaaa

SEQ ID NO: 65 - DNA, 2832 bp, HUMAN
gcgagctgacagccgccgccgccgccgcctccgcccaccttcctcgccggggcttcgtctttcactccttcgggctgcctccccctccccttgtcccctgccccttgccctgcttctgcagaagatttcaacactacacttgcacaatgtctttgaaaccaagagtagtagattttgatgaaacatggaacaaacttttgacgacaataaaagccgtggtcatgttggaatacgtcgaaagagcaacatggaatgaccgtttctcagatatctatgctttatgtgtggcctatcctgaaccccttggagaaagactttatacagaaactaagatttttttggaaaatcatgttcggcatttgcataagagagttttggagtcagaagaacaagtacttgttatgtatcataggtactgggaagaatacagcaagggtgcagactatatggactgcttatataggtatctcagcacccagtttattaaaaagaataaattaacagaagcggaccttcagtatggctatggtggtgtagatatgaatgaaccacttatggaaataggagagctagcattggatatgtggaggaaattgatggttgaaccacttcaggccatccttatccgaatgctgctccgagaaatcaaaaatgatcgtggtggagaagacccaaaccagaaagtaatccatggggttattaactcctttgttcatgttgaacagtataagaaaaaattccccttaaagttttatcaggaaatttttgagtctccctttctgactgaaacaggagagtattacaaacaagaagcttcaaatttattacaagaatcaaactgctcacagtatatggaaaaggttttaggtagattaaaagatgaagaaattcgatgtcgaaaatacctacatccaagttcatatactaaggtgattcatgaatgtcaacaacgaatggtagcagaccacttacagtttttacatgcagaatgtcataatataattcgacaagagaaaaaaaatgacatggcaaatatgtacgtcttactccgtgctgtgtccactggtttacctcatatgattcaggagctgcaaaaccacatccatgatgagggccttcgagcaaccagcaaccttactcaggaaaacatgccaacactatttgtggagtcagttttggaagtgcatggtaaatttgttcagcttatcaacactgttttgaatggtgatcagcattttatgagtgcgttggataaggcccttacgtcagttgtaaattacagagaacctaagtctgtttgcaaagcacctgaactgcttgctaagtactgtgacaacttactgaagaagtcagcgaaagggatgacagagaatgaagtggaagacaggcttacgagcttcatcacagtgttcaaatacattgatgacaaggacgtctttcaaaagttctacgcaagaatgctggcaaaacgtttaattcatgggttatccatgtctatggactctgaagaagccatgatcaacaaattaaagcaagcctgtggttatgagtttaccagcaagctacatcggatgtatacagatatgagtgtcagcgctgatctcaacaataagttcaacaattttatcaaaaaccaagacacagtaatagatttgggaattagttttcaaatatatgttctacaggctggtgcgtggcctcttactcaggctccttcatctacgtttgcaattccccaggaattagaaaaaagtgtacagatgtttgaattattttatagccaacatttcagtggaaggaaacttacatggttacattatctgtgtacaggtgaagttaaaatgaactatttgggcaaaccatatgtagccatggttacaacataccaaatggcagttcttcttgcctttaacaacagtgaaactgtcagttataaagagcttcaggacagcactcagatgaatgaaaaggaactgacaaaaacaatcaaatcattacttgatgtgaaaatgattaaccatgattcagaaaaggaagatattgatgcagaatcttcgttttcattaaatatgaactttagcagtaaaagaacaaaatttaaaattactacatcaatgcagaaagacacaccacaagaaatggagcagactagaagtgcagttgatgaggaccggaaaatgtatctccaagctgctatagttcgtatcatgaaagcacgaaaagtgcttcggcacaatgcccttattcaagaggtgattagccagtcaagagctaggtttaatcccagtatcagcatgattaagaagtgtattgaagttctgatagacaaacaatacatagaacgcagccaggcgtcggcagatgaatacagctacgtcgcgtgatgtcgctctcctccagcgtggtgtgagaagatcattgccatcaccatttggtgtgttcctgtgggaaaaagcaggactgtgcctccataatttggtcatttggcagcccctgttttctgctgtttacaacatcaccagtgccacgtcatgagcgtcaaagaaaatgcctagagatatttcaagctcatgacattatgacatttcttaaaactttattaaaagaatgagtgaagtattgctgaaaagtggaaaatcggttgggtaccatgctttttctccccttcacgtttgcagttgatgtgtctttttttttttttttaatgtatcttaaaggacataaaatttaaaaacttaaatattgtaatatgacagataacctaataattgtatctacattaaaatgacaaacatgatactgctgcttgtcaaataaaaaaaaaaaaaaaaa

SEQ ID NO: 66 - DNA, 2029 bp, HUMAN
atattgtgcttccaccactgccaataacaaaataactagcaaccatgaagtgggtggaatcaatttttttaattttcctactaaattttactgaatccagaacactgcatagaaatgaatatggaatagcttccatattggattcttaccaatgtactgcagagataagtttagctgacctggctaccatattttttgcccagtttgttcaagaagccacttacaaggaagtaagcaaaatggtgaaagatgcattgactgcaattgagaaacccactggagatgaacagtcttcagggtgtttagaaaaccagctacctgcctttctggaagaactttgccatgagaaagaaattttggagaagtacggacattcagactgctgcagccaaagtgaagagggaagacataactgttttcttgcacacaaaaagcccactccagcatcgatcccacttttccaagttccagaacctgtcacaagctgtgaagcatatgaagaagacagggagacattcatgaacaaattcatttatgagatagcaagaaggcatcccttcctgtatgcacctacaattcttctttgggctgctcgctatgacaaaataattccatcttgctgcaaagctgaaaatgcagttgaatgcttccaaacaaaggcagcaacagttacaaaagaattaagagaaagcagcttgttaaatcaacatgcatgtgcagtaatgaaaaattttgggacccgaactttccaagccataactgttactaaactgagtcagaagtttaccaaagttaattttactgaaatccagaaactagtcctggatgtggcccatgtacatgagcactgttgcagaggagatgtgctggattgtctgcaggatggggaaaaaatcatgtcctacatatgttctcaacaagacactctgtcaaacaaaataacagaatgctgcaaactgaccacgctggaacgtggtcaatgtataattcatgcagaaaatgatgaaaaacctgaaggtctatctccaaatctaaacaggtttttaggagatagagattttaaccaattttcttcaggggaaaaaaatatcttcttggcaagttttgttcatgaatattcaagaagacatcctcagcttgctgtctcagtaattctaagagttgctaaaggataccaggagttattggagaagtgtttccagactgaaaaccctcttgaatgccaagataaaggagaagaagaattacagaaatacatccaggagagccaagcattggcaaagcgaagctgcggcctcttccagaaactaggagaatattacttacaaaatgcgtttctcgttgcttacacaaagaaagccccccagctgacctcgtcggagctgatggccatcaccagaaaaatggcagccacagcagccacttgttgccaactcagtgaggacaaactattggcctgtggcgagggagcggctgacattattatcggacacttatgtatcagacatgaaatgactccagtaaaccctggtgttggccagtgctgcacttcttcatatgccaacaggaggccatgcttcagcagcttggtggtggatgaaacatatgtccctcctgcattctctgatgacaagttcattttccataaggatctgtgccaagctcagggtgtagcgctgcaaacgatgaagcaagagtttctcattaaccttgtgaagcaaaagccacaaataacagaggaacaacttgaggctgtcattgcagatttctcaggcctgttggagaaatgctgccaaggccaggaacaggaagtctgctttgctgaagagggacaaaaactgatttcaaaaactcgtgctgctttgggagtttaaattacttcaggggaagagaagacaaaacgagtctttcattcggtgtgaacttttctctttaattttaactgatttaacactttttgtgaattaatgaaatgataaagacttttatgtgagatttccttatcacagaaataaaatatctccaaatg

SEQ ID NO: 67 - DNA, 1438 bp, HUMAN
gggctgcagtgagccaaaagcatgccattgcactccagcttgggcaacagagtgagaccctgtctcaaaaaaaagaaaaaataatactatgtctggtccataacctgaaatatttttatcttcacgttccttatcattcactgaacttttatttttcttttaaaattttttcctttctttttaaatttgcttctacagatttcttcattctccatttagcaaggtcatggaagatttggaggaaacattatttgaagaatttgaaaactattcctatgacctagactattactctctggagtctgatttggaggagaaagtccagctgggagttgttcactgggtctccctggtgttatattgtttggcttttgttctgggaattccaggaaatgccatcgtcatttggttcacggggctcaagtggaagaagacagtcaccactctgtggttcctcaatctagccattgcggatttcatttttcttctctttctgcccctgtacatctcctatgtggccatgaatttccactggccctttggcatctggctgtgcaaagccaattccttcactgcccagttgaacatgtttgccagtgtttttttcctgacagtgatcagcctggaccactatatccacttgatccatcctgtcttatctcatcggcatcgaaccctcaagaactctctgattgtcattatattcatctggcttttggcttctctaattggcggtcctgccctgtacttccgggacactgtggagttcaataatcatactctttgctataacaattttcagaagcatgatcctgacctcactttgatcaggcaccatgttctgacttgggtgaaatttatcattggctatctcttccctttgctaacaatgagtatttgctacttgtgtctcatcttcaaggtgaagaagcgaacagtcctgatctccagtaggcatttctggacaattctggttgtggttgtggcctttgtggtttgctggactccttatcacctgtttagcatttgggagctcaccattcaccacaatagctattcccaccatgtgatgcaggctggaatccccctctccactggtttggcattcctcaatagttgcttgaaccccatcctttatgtcctaattagtaagaagttccaagctcgcttccggtcctcagttgctgagatactcaagtacacactgtgggaagtcagctgttctggcacagtgagtgaacagctcaggaactcagaaaccaagaatctgtgtctcctggaaacagctcaataagttattacttttccacaaatcagtatatggctttttatgtgggtcctctgactgatgctttcagattaaaattgtttccaagatagagagccgactccactttcatagttattgtttctggtcacatatatggcatcacatttt

SEQ ID NO: 68 - DNA, 1350 bp, HUMAN
cgccactgccacccctcccagactgtggacgggaggatggagtcgatggccgtcgctaccgacggcggggagaggccgggggtcccagcgggctcaggtctgtcggcttcccagcgtcgggcggagctgcgtcggagaaagctgctcatgaactcggaacagcgcatcaaccggatcatgggctttcacaggcccgggagcggcgcggaagaagaaagtcaaacaaaatcaaagcagcaggacagtgataaactgaactccctcagcgttccttccgtttcaaagcgagtagtgctgggtgattcagtcagtacaggaacaactgaccagcagggtggtgtggccgaggtaaaggggacccaactgggagacaaattggactcgttcattaaaccacctgagtgcagtagtgatgtcaaccttgagctccggcagcggaacagaggggacctgacagcggactcggtccagaggggttcccgccatggcctagagcagtacctttccagattcgaagaagcaatgaagctaaggaaacagctgattagtgaaaaacccagtcaagaggatggaaatacaacagaagaatttgactcttttcgaatatttagattggtgggatgtgctcttcttgctcttggagtcagagcttttgtttgcaaatacttgtccatatttgctccatttcttactttacaacttgcgtacatgggattatacaaatattttcccaagagtgaaaagaagataaagacaacagtactaacagctgcacttctattgtcgggaattcctgccgaagtgataaatcgatcaatggatacctatagcaaaatgggcgaagtcttcacagatctctgtgtctactttttcacttttatcttttgtcatgaactgcttgattattggggctctgaagtaccatgaagcctgtagaactgagaaggagaagcttacgaaaaaaatcctcttctatattgcagtgtctctaaaggaggcaaattggtttacaccttcatgtaattcttttactttaggggttgtaaagctactttattagatatagaatggcagattctctgatttaaaagggctgagtttgtattattactgatatgaagaatagagtaccaatgtcattaattgatttttcttgttaatcagaattcctattctgtacctttcctctaacttctcagatttgtaattcttcttttcgggagctgagctagtgcttttaggagaacagataaatgtggtctcagccagccctagagactgcttcttgtgtttgtgtcattctgtcctgagaaatgaagtcatctgaaaaataaaaatgcagaaacccaa

SEQ ID NO: 69 - DNA, 1313 bp, HUMAN
atgagctcggcctcggggctccgcagggggcacccggcagtgtcaactgttagccacgcagatgccgattgctttgtgtgtgtcttcctgagccatggcgaaggcaatcacatttatgcatatgatgctaaaatcgaaattcagacattaactggcttgttcaaaggagacaagtgtcacagcctggttggaaaacccaagatatttatcatccaggcatgtcggggaaaccagcacgatgtgccagtcattcctttggatgtagtagataatcagacagagaagttggacaccaacataactgaggtggatgcagcctccgtttacacgctgcctgctggagctgacttcctcatgtgttactctgttgcagaaggatattattctcaccgggaaactgtgaacggctcatggtacattcaagatttgtgtgagatgttgggaaaatatggctcctccttagagttcacagaactcctcacactggtgaacaggaaagtttctcagcgccgagtggacttttgcaaagacccaagtgcaattggaaagaagcaggttccctgttttgcctcaatgctaactaaaaagctgcatttctttccaaaatctaattaattaatagaggctatctaatttcacactctgtattgaaaatggctttctcagccaggcgtggttactcacacctgtaatcccagcactttgggagtccaaggtgggcggatcacctgaggtcgggagttcgagaccagcctgaccaacatggcagaagccccgcctctactaaaaatgcaaaaaaaaatttagctaggcatggcggcgcatgcctgcaatcccagctacttggaaggctgaggcaggagaatcacttgaacccaggaggtggaggctgcggtgagccgagcattgcgccattgcactccagcctgggcaacgagtgaaactccgtctcaaaaaaaaagaaaatgtctttctcttccttttatataaatatcgttagggtgaagcattatggtctaatgattcaaatgttttaaagtttaatgcctagcagagaactgccttaaaaaaaaaaagttcatgttggccatggtgaaagggtttgatatggagaaacaaaatcctcaggaaattagataaatagaaatttataagcatttgtattattttttaataaactgcagggttacaccaaaatctagctgatttaacttgtattttgtcacttttttataaaagtttattgtttgatgtttttaaaggtttttgaaatccaggaattaaatcatcccttaataaaatattcgaaattc

SEQ ID NO: 70 - DNA, 2641 bp, HUMAN
ggccggtggcccgggcccgaccaccccagctgcgcgtcgttactggccacaagtttgctctgggccagccaagttggcaacttggaagcttctcccgggctctggaggagggtccctgcttcttcctacagccgttccgggcatggccgggctgggggcgtcgctccacgtctggggttggctaatgctcggcagctgcctcctggccagagcccagctggattctgatggcaccattactatagaggagcagattgtccttgtgctgaaagcgaaagtacaatgtgaactcaacatcacagctcaactccaggagggagaaggtaattgtttccctgaatgggatggactcatttgttggcccagaggaacagtggggaaaatatcggctgttccatgccctccttatatttatgacttcaaccataaaggagttgctttccgacactgtaaccccaatggaacatgggattttatgcacagcttaaataaaacatgggccaattattcagactgccttcgctttctgcagccagatatcagcataggaaagcaagaattctttgaacgcctctatgtaatgtataccgttggctactccatctcttttggttccttggctgtggctattctcatcattggttacttcagacgattgcattgcactaggaactatatccacatgcacttatttgtgtctttcatgctgagagctacaagcatctttgtcaaagacagagtagtccatgctcacataggagtaaaggagctggagtccctaataatgcaggatgacccacaaaattccattgaggcaacttctgtggacaaatcacaatatatcgggtgcaagattgctgttgtgatgtttatttacttcctggctacaaattattattggatcctggtggaaggtctctacctgcataatctcatctttgtggctttcttttcggacaccaaatacctgtggggcttcatcttgataggctgggggtttccagcagcatttgttgcagcatgggctgtggcacgagcaactctggctgatgcgaggtgctgggaacttagtgctggagacatcaagtggatttatcaagcaccgatcttagcagctattgggctgaattttattctgtttctgaatacggttagagttctagctaccaaaatctgggagaccaatgcagttgggcatgacacaaggaagcaatacaggaaactggccaaatcgacactggtcctggtcctagtctttggagtgcattacatcgtgttcgtatgcctgcctcactccttcactgggctcgggtgggagatccgcatgcactgtgagctcttcttcaactcctttcagggtttctttgtgtctatcatctactgctactgcaatggagaggttcaggcagaggtgaagaagatgtggagtcggtggaatctctccgtggactggaaaaggacaccgccatgtggcagccgcagatgcggctcagtgctcaccaccgtgacgcacagcaccagcagccagtcacaggtggcggccagcacacgcatggtgcttatctctggcaaagctgccaagatcgccagcagacagcctgacagccacatcactttacctggctatgtctggagtaactcagagcaggactgcctgccacactctttccacgaggagaccaaggaagatagtgggaggcagggagatgatattctaatggagaagccttccaggcctatggaatctaacccagacactgaaggatgccaaggagaaactgaggatgttctctgaatggacatttgtggctgactttcatgggctggtccaatggctggttgtgtgagagggcttggctgatactcctatgcttgagttcaaaggctgaaaattcagttaaggtgttacttaataatagtttttaggctccatgaattggctcctgtaaatactaacgacatgaaaatgcaagtgtcaatggagtagtttattaccttctattggcatcaagttttcctctaaattaatgtatggtatttgctctgtgattgttcatttttttctgctacttttgggtagaaaaaagattcaattgcttggctgtagctttctctcatatatatcaccctaaatataatgaagatcttttagtgtgtatcattttccttttagaaactagtattctcttatttcttactttaatgtacttctatcactgcatttattttgcctgtgcataggagcaattaggatctaaaaaaatatatgggaagataaaagatctaagaacaagtacttgctggaaaattagttggctggacattgataaaataatgcatttataacaattacatgtgtttttgggaacaaggaaaatttctcaaaaaagaatatttcacacatcccttcttttgaatggcctctttgtgaccagccagacctcaggtcttcactctttcttctttgtaaaccatgtcatgtggaaagatttcctcagttagtgagcttgtgtctgcaaattgattttgtttgtaatgtattttgatagcaaatcatgctgcatctatatctttttcttgtttgagctgttactacattgtacatggcatgtgggatcaattaaaaatttgttttaaaaat

SEQ ID NO: 71 - DNA, 792 bp, HUMAN
atggatgatcgagaggatctggtgtaccaggcgaagctggccgagcaggctgagcgatacgacgaaatggtggagtcaatgaagaaagtagcagggatggatgtggagctgacagttgaagaaagaaacctcctatctgttgcatataagaatgtgattggagctagaagagcctcctggagaataatcagcagcattgaacagaaagaagaaaacaagggaggagaagacaagctaaaaatgattcgggaatatcggcaaatggttgagactgagctaaagttaatctgttgtgacattctggatgtactggacaaacacctcattccagcagctaacactggcgagtccaaggttttctattataaaatgaaaggggactaccacaggtatctggcagaatttgccacaggaaacgacaggaaggaggctgcggagaacagcctagtggcttataaagctgctagtgatattgcaatgacagaacttccaccaacgcatcctattcgcttaggtcttgctctcaatttttccgtattctactacgaaattcttaattcccctgaccgtgcctgcaggttggcaaaagcagcttttgatgatgcaattgcagaactggatacgctgagtgaagaaagctataaggactctacacttatcatgcagttgttacgtgataatctgacactatggacttcagacatgcagggtgacggtgaagagcagaataaagaagcgctgcaggacgtggaagacgaaaatcagtgagacataagccaacaagagaaacca

SEQ ID NO: 72 - DNA, 991 bp, HUMAN
atgactaagttttcttccttttctctgtttttcctaatagttggggcttatatgactcatgtgtgtttcaatatggaaattattggagggaaagaagtgtcacctcattccaggccatttatggcctccatccagtatggcggacatcacgtttgtggaggtgttctgattgatccacagtgggtgctgacagcagcccactgccaatatcggtttaccaaaggccagtctcccactgtggttttaggcgcacactctctctcaaagaatgaggcctccaaacaaacactggagatcaaaaaatttataccattctcaagagttacatcagatcctcaatcaaatgatatcatgctggttaagcttcaaacagccgcaaaactcaataaacatgtcaagatgctccacataagatccaaaacctctcttagatctggaaccaaatgcaaggttactggctggggagccaccgatccagattcattaagaccttctgacaccctgcgagaagtcactgttactgtcctaagtcgaaaactttgcaacagccaaagttactacaacggcgacccttttatcaccaaagacatggtctgtgcaggagatgccaaaggccagaaggattcctgtaagggtgactcagggggccccttgatctgtaaaggtgtcttccacgctatagtctctggaggtcatgaatgtggtgttgccacaaagcctggaatctacaccctgttaaccaagaaataccagacttggatcaaaagcaaccttgtcccgcctcatacaaattaagttacaaataattttattggatgcacttgcttcttttttcctaatatgctcgcaggttagagttgggtgtaagtaaagcagagcacatatggggtccatttttgcacttgtaagtcattttattaaggaatcaagttctttttcacttgtatcactgatgtatttctaccatgctggttttattctaaataaaatt

SEQ ID NO: 73 - DNA, 1883 bp, HUMAN
atgcccgagaatgtggcaccccggagcggggcgactgccggggctgccggcggccgcgggaaaggcgcctatcaggaccgcgacaagccagcccagatccgcttcagcaacatttccgccgccaaagcggttgctgatgctattagaacaagccttggaccaaaaggaatggataaaatgattcaagatggaaaaggtgatgtaaccattacaaatgatggtgctaccattctgaaacaaatgcaagtattacatccagcagccagaatgctggtggagctgtctaaggctcaagatatagaagcaggagatggcaccacatcagtagtcatcattgctggctccctcttagattcttgtaccaagcttcttcagaaagggattcatccaaccatcatttctgagtcattccagaaggccctggaaaagggcattgaaatcttgactgacatgtctcgacctgtggaactgagtgacagagaaactttgttaaatagtgcaaccacttcactgaactcaaaggtggtttctcagtattcaagtctgctttctccaatgagtgtaaatgcagtgatgaaagtgattgacccagccacagccaccagtgtagatcttagagatattaaaatagttaagaagcttggtgggacaattgatgactgtgagttggtggaagggctggttctcacccaaaaagtgtcaaattctggcataaccagagttgaaaaggccaagattgggcttattcagttttgcttatctgctcccaaaacagacatggataatcaaatagtggtttctgactatgcccagatggaccgagtgctgcgagaagagagagcctatattttaaatttagtgaagcaaattaaaaaaacaggatgtaatgtccttctcatacagaaatctattctaagagatgctcttagtgatcttgcattacactttctgaataaaatgaagatcatggtgattaaggatattgaaagagaagacattgaattcatttgtaagacaattggaaccaagccagttgctcatattgaccaatttactgctgacatgctgggttctgctgagttagctgaggaggtcaatttaaatggttctggcaaactgctcaagattacaggctgtgccagccctggaaaaacagttacaattgttgttcgtggttctaacaaactggtgattgaagaagctgagcgctccattcatgatgccctatgtgttattcgttgtttagtgaagaagagggctcttattgcaggaggtggtgctccagaaatagagttggccctagcattaactgaatattcacgaacactgagtggtatggaatcctactgcgttcgtgcttttgcagatgctatggaggtcattccatctacactagctgaaaatgccggcctgaatcccatttctacagtaacagaactaagaaaccggcatgcccagggagaaaaaactgcaggcattaatgtccgaaagggtggtatttccaacattttggaggaactggttgtccagcctctgttggtatcagtcagtgctctgactcttgcaactgaaactgttcggagcattctgaaaatagatgatgtggtaaacactcgataatctggataactgactagcaccattatgatcaccagtattgtggctggaatggaagaagatcaccttggtgttccttgtttggaagattatttcctctgaatttctgggcttggtcttccagttggcatttgcctgaagttgtattgaaacaatttaatgaaaatattaaatatttggtttcaaaaggcagatttatcttctcccaacattctgttatttctgatacttttgaaaaactaataaaaactaataaaagaagcgta

SEQ ID NO: 74 - DNA, 2025 bp, HUMAN
ggcagcggtggcaggggctgcaggagcaagtgaccaggagcaggactggggacaggcctgatcgcccctgcacgaaccagacccttcgccgccctcacgatgactacctctccgatcctgcagctgctgctgcggctctcactgtgcgggctgctgctccagagggcggagacaggctctaaggggcagacggcgggggagctgtaccagcgctgggaacggtaccgcagggagtgccaggagaccttggcagccgcggaaccgccttcaggcctcgcctgtaacgggtccttcgatatgtacgtctgctgggactatgctgcacccaatgccactgcccgtgcgtcctgcccctggtacctgccctggcaccaccatgtggctgcaggtttcgtcctccgccagtgtggcagtgatggccaatggggactttggagagaccatacacaatgtgagaacccagagaagaatgaggcctttctggaccaaaggctcatcttggagcggttgcaggtcatgtacactgtcggctactccctgtctctcgccacactgctgctagccctgctcatcttgagtttgttcaggcggctacattgcactagaaactatatccacatcaacctgttcacgtctttcatgctgcgagctgcggccattctcagccgagaccgtctgctacctcgacctggcccctaccttggggaccaggcccttgcgctgtggaaccaggccctcgctgcctgccgcacggcccagatcgtgacccagtactgcgtgggtgccaactacacgtggctgctggtggagggcgtctacctgcacagtctcctggtgctcgtgggaggctccgaggagggccacttccgctactacctgctcctcggctggggggcccccgcgcttttcgtcattccctgggtgatcgtcaggtacctgtacgagaacacgcagtgctgggagcgcaacgaagtcaaggccatttggtggattatacggacccccatcctcatgaccatcttgattaatttcctcatttttatccgcattcttggcattctcctgtccaagctgaggacacggcaaatgcgctgccgggattaccggctgaggctggctcgctccacgctgacgctggtgcccctgctgggtgtccacgaggtggtgtttgctcccgtgacagaggaacaggcccggggcgccctgcgcttcgccaagctcggctttgagatcttcctcagctccttccagggcttcctggtcagcgtcctctactgcttcatcaacaaggaggtgcagtcggagatccgccgtggctggcaccactgccgcctgcgccgcagcctgggcgaggagcaacgccagctcccggagcgcgccttccgggccctgccctccggctccggcccgggcgaggtccccaccagccgcggcttgtcctcggggaccctcccagggcctgggaatgaggccagccgggagttggaaagttactgctagggggcgggatccccgtgtctgttcagttagcatggatttattgagtgccaactgcgtgccaggcccagtacggaggacgctggggaaatggtgaaggaaacagaaaaaaggtccctgcccttctggagatgacaactgagtggggaaaacagaccgtgaacacaaaacatcaagttccacacacgctatggaatggttatgaagggaagcgagaagggggcctagggtggtctgggaggcgtctccaaggaggtgacacttaagccatccccgaaagaggtgaaagagatcactttggggagagctggagaacaggattctaggcggaagcgatagcataggcaaaggcccttgggcaggaaggcgctcagccttggctggagtagaattaagtcagagccaacaggttggggagagacagagaagtgggcaggggcacccaagttgggatttcatttcaggtgcattggagattcttaggagtgtctcttgggggtaatattttattttttaaaaaatgaggat

SEQ ID NO: 75 - DNA, 1610 bp, HUMAN
ggcggtgctctacgtcttcaccgctggagatctgctgccccgggcaggtccccgtttcctcacgcggctcttcgaaggctctggggaggcccgagggggcggccgctctagggaagggaccatggagctccgaactacccctcagctgaaagtggtggggcagggccgcggcaatggagacccggggggtgggatggagaaggacggtccggaatgggacctttgacagcagaccctacaacctgctgcccttccctgtccctttccaccccccacccaccctccagaggtcctcccgacggccatgaacactacatcttctgcagcacccccctcactaggtgtagagttcatctctctgctggctatcatcctgctgtcagtggcgctggctgtggggcttcccggcaacagctttgtggtgtggagtatcctgaaaaggatgcagaagcgctctgtcactgccctgatggtgctgaacctggccctggccgacctggccgtattgctcactgctccctttttccttcacttcctggcccaaggcacctggagttttggactggctggttgccgcctgtgtcactatgtctgcggagtcagcatgtacgccagcgtcctgcttatcacggccatgagtctagaccgctcactggcggtggcccgcccctttgtgtcccagaagctacgcaccaaggcgatggcccggcgggtgctggcaggcatctgggtgttgtcctttctgctggccacacccgtcctcgcgtaccgcacagtagtgccctggaaaacgaacatgagcctgtgcttcccgcggtaccccagcgaagggcaccgggccttccatctaatcttcgaggctgtcacgggcttcctgctgcccttcctggctgtggtggccagctactcggacatagggcgtcggctacaggcccggcgcttccgccgcagccgccgcaccggccgcctggtggtgctcatcatcctgaccttcgccgccttctggctgccctaccacgtggtgaacctggctgaggcgggccgcgcgctggccggccaggccgccgggttagggctcgtggggaagcggctgagcctggcccgcaacgtgctcatcgtactcgccttcctgagcagcagcgtgaaccccgtgctgtacgcgtgcgccggcggcggcctcgtgcgctcggcgggcgtgggcttcgtcgccaagctgctggagggcacgggctccgaggcgtccagcacgcgccgcgggggcagcctgggccagaccgctaggagcggccccgccgctctggagcccggcccttccgagagcctcactgcctccagccctctcaagttaaacgaactgaactaggcctggtggaaggaggcgcactttcctcctggcagaatgctagctctgagccagttcagtacctggaggaggagcaggggcgtggagggcgtggagggcgtgggagcgtgggaggcgggagtggagtggaagaagagggagagatggagcaaagtgagggccgagtgagagcgtgctccagcctggctcccacaggcagctttaaccattaaaactgaagtctgaaatttggtcaaaaaaaaaaaaa

SEQ ID NO: 76 - DNA, 2834 bp, HUMAN
gcccactcccaccgccagctggaaccctggggactacgacgtccctcaaaccttgcttctaggagataaaaagaacatccagtcatggataaaaatgagctggttcagaaggccaaactggccgagcaggctgagcgatatgatgacatggcagcctgcatgaagtctgtaactgagcaaggagctgaattatccaatgaggagaggaatcttctctcagttgcttataaaaatgttgtaggagcccgtaggtcatcttggagggtcgtctcaagtattgaacaaaagacggaaggtgctgagaaaaaacagcagatggctcgagaatacagagagaaaattgagacggagctaagagatatctgcaatgatgtactgtctcttttggaaaagttcttgatccccaatgcttcacaagcagagagcaaagtcttctatttgaaaatgaaaggagattactaccgttacttggctgaggttgccgctggtgatgacaagaaagggattgtcgatcagtcacaacaagcataccaagaagcttttgaaatcagcaaaaaggaaatgcaaccaacacatcctatcagactgggtctggcccttaacttctctgtgttctattatgagattctgaactccccagagaaagcctgctctcttgcaaagacagcttttgatgaagccattgctgaacttgatacattaagtgaagagtcatacaaagacagcacgctaataatgcaattactgagagacaacttgacattgtggacatcggatacccaaggagacgaagctgaagcaggagaaggaggggaaaattaaccggccttccaacttttgtctgcctcattctaaaatttacacagtagaccatttgtcatccatgctgtcccacaaatagttttttgtttacgatttatgacaggtttatgttacttctatttgaatttctatatttcccatgtggtttttatgtttaatattaggggagtagagccagttaacatttagggagttatctgttttcatcttgaggtggccaatatggggatgtggaatttttatacaagttataagtgtttggcatagtacttttggtacattgtggcttcaaaagggccagtgtaaaactgcttccatgtctaagcaaagaaaactgcctacatactggtttgtcctggcggggaataaaagggatcattggttccagtcacaggtgtagtaattgtgggtactttaaggtttggagcacttacaaggctgtggtagaatcataccccatggataccacatattaaaccatgtatatctgtggaatactcaatgtgtacacctttgactacagctgcagaagtgttcctttagacaaagttgtgacccattttactctggataagggcagaaacggttcacattccattatttgtaaagttacctgctgttagctttcattatttttgctacactcattttatttgtatttaaatgttttaggcaacctaagaacaaatgtaaaagtaaagatgcaggaaaaatgaattgcttggtattcattacttcatgtatatcaagcacagcagtaaaacaaaaacccatgtatttaacttttttttaggatttttgcttttgtgattttttttttttttttttgatacttgcctaacatgcatgtgctgtaaaaatagttaacagggaaataacttgagatgatggctagctttgtttaatgtcttatgaaattttcatgaacaatccaagcataattgttaagaacacgtgtattaaattcatgtaagtggaataaaagttttatgaatggacttttcaactactttctctacagcttttcatgtaaattagtcttggttctgaaacttctctaaaggaaattgtacattctttgaaatttattccttattccctcttggcagctaatgggctcttaccaagtttaaacacaaaatttatcataacaaaaatactactaatataactactgtttccatgtcccatgatcccctctcttcctccccaccctgaaaaaaatgagttcctattttttctgggagagggggggattgattagaaaaaaatgtagtgtgttccatttaaaattttggcatatggcattttctaacttaggaagccacaatgttcttggcccatcatgacattgggtagcattaactgtaagttttgtgcttccaaatcactttttggtttttaagaatttcttgatactcttatagcctgccttcaattttgatcctttattctttctatttgtcaggtgcacaagattaccttcctgttttagccttctgtcttgtcaccaaccattcttacttggtggccatgtacttggaaaaaggccgcatgatctttctggctccactcagtgtctaaggcaccctgcttcctttgcttgcatcccacagactatttccctcatcctatttactgcagcaaatctctccttagttgatgagactgtgtttatctccctttaaaaccctacctatcctgaatggtctgtcattgtctgcctttaaaatccttcctctttcttcctcctctattctctaaataatgatggggctaagttatacccaaagctcactttacaaaatatttcctcagtactttgcagaaaacaccaaacaaaaatgccattttaaaaaaggtgtattttttcttttagaatgtaagctcctcaagagcagggacaatgttttctgtatgttctattgtgcctagtacactgtaaatgctcaataaatattgatgatgggaggcagtgagtcttgatgataagggtgagaaactgaaatccc

SEQ ID NO: 77 - DNA, 5389 bp, HUMAN
gcggccgcgcaagtcctccaccatgtgaatgccaacatggccaggtcattagagctgagggaaaactagtgcccaaagatatgaaaagagtgtggatcttctggagaagtgctgttgttcaacaggtacaaaattggaaatgttggcttcaccagaacctaagggccttgttcccttcactaaagagtcttttgaacttataaaacagcatattgctaaaacacataatgaagaccatgaagaagaagacttaaagccaaatcctgatttggaagttggcaaaaagcttccatttatttatggaaacctttctcaaggaatggtgtcagagcccttggaagatgtggacccatattactacaagaaaaaaaatactttcatagtattaaataaaaatagaacaatcttcagattcaatgcggcttccatcttgtgtacattgtctcctttcaattgtattagaagaacaactatcaaggttttggtacatccctttttccaactgtttattctaattagtgtcctgattgattgcgtattcatgtccctgactaatttgccaaaatggagaccagtattagagaatactttgcttggaatttacacatttgaaatacttgtaaaactctttgcaagaggtgtctgggcaggatcattttccttcctcggtgatccatggaactggctcgatttcagcgtaactgtgtttgaggttattataagatactcacctctggacttcattccaacgcttcaaactgcaagaactttgagaattttaaaaattattcctttaaatcaaggtctgaaatcccttgtaggggtcctgatccactgcttgaagcagcttattggtgtcattatcctaactctgttttttctgagcatattttctctaattgggatggggctcttcatgggcaacttgaaacacaaatgttttcgatggccccaagagaatgaaaatgaaaccctgcacaacagaactggaaacccatattatattcgagaaacagaaaacttttattatttggaaggagaaagatatgctctcctttgtggcaacaggacagatgctggtcagtgtcctgaaggatatgtgtgtgtaaaagctggcataaatcctgatcaaggcttcacaaattttgacagttttggctgggccttatttgccctatttcggttaatggctcaggattaccctgaagtactttatcacctgatactttatgcttctgggaaggtctacatgatattttttgtggtggtaagttttttgttttccttttatatggcaagtttgttcttaggcatacttgccatggcctatgaagaagaaaagcagagagttggtgaaatatctaagaagattgaaccaaaatttcaacagactggaaaagaacttcaagaaggaaatgaaacagatgaggccaagaccatacaaatagaaatgaagaaaaggtcaccaatttccacagacacatcattggatgtgttggaagatgctactctcagacataaggaagaacttgaaaaatccaagaagatatgcccattatactggtataagtttgctaaaactttcttgatctggaattgttctccctgttggttaaaattgaaagagtttgtccataggattataatggcaccatttactgatcttttccttatcatatgcataattttaaacgtatgttttctgaccttggagcattatccaatgagtaaacaaactaacactcttctcaacattggaaacctggttttcattggaattttcacagcagaaatgatttttaaaataattgcaatgcatccatatgggtatttccaagtaggttggaacatttttgatagcatgatagtgttccatggtttaatagaactttgtctagcaaatgttgcaggaatggctcttcttcgattattcaggatgttaagaattttcaagttgggaaagtattggccaacattccagattttgatgtggtctcttagtaactcatgggtggccctgaaagacttggtcctgttgttgttcacattcatcttcttttctgctgcattcggcatgaagctgtttggtaagaattatgaagaatttgtctgccacatagacaaagactgtcaactcccacgctggcacatgcatgactttttccactccttcctgaatgtgttccgaattctctgtggagagtgggtagagaccttgtgggactgtatggaggttgcaggccaatcctggtgtattcctttttacctgatggtcattttaattggaaatttactggtactttacctgtttctggcattggtgagctcatttagttcatgcaaggatgtaacagctgaagagaataatgaagcaaaaaatctccagcttgcagtggcaagaattaaaaaaggaataaactatgtgcttcttaaaatactatgcaaaacacaaaatgtcccaaaggacacaatggaccatgtaaatgaggtatatgttaaagaagatatttctgaccataccctttctgaattgagcaacacccaagattttctcaaagataaggaaaaaagcagtggcacagagaaaaacgctactgaaaatgagagccaatcacttatccccagtcctagtgtctcagaaactgtaccaattgcttcaggagaatctgatatagaaaatctggataataaggagattcagagtaagtctggtgatggaggcagcaaagagaaaataaagcaatctagctcatctgaatgcagtactgttgatattgctatctctgaagaagaagaaatgttctatggaggtgaaagatcaaagcatctgaaaaatggttgcagacgcggatcttcacttggtcaaatcagtggagcatccaagaaaggaaaaatctggcagaacatcaggaaaacctgctgcaagattgtagagaacaattggtttaagtgttttattgggcttgttactctgctcagcactggcactctggcttttgaagatatatatattgatcagagaaagacaattaaaattttattagaatatgctgacatgatctttacttatatcttcattctggaaatgcttctaaaatggatggcatatggttttaaggcctatttctctaatggctggtacaggctggacttcgtggttgttattgtgttttgtcttagcttaataggcaaaactcgggaagaactaaaacctcttatttccatgaaattccttcggcccctcagagttctatctcaatttgaaagaatgaaggtggttgtgagagctttgatcaaaacaaccttacccactttgaatgtgtttcttgtctgcctgatgatctggctgatttttagtatcatgggagtagacttatttgctggcagattctatgaatgcattgacccaacaagtggagaaaggtttccttcatctgaagtcatgaataagagtcggtgtgaaagccttctgtttaacgaatccatgctatgggaaaatgcaaaaatgaactttgataatgttggaaatggtttcctttctctgcttcaagtagcaacatttaatggatggatcactattatgaattcagcaattgattctgttgctgttaatatacagcctcattttgaagtcaacatctacatgtattgttactttatcaactttattatatttggagtatttctccctctgagtatgctgattactgttattattgataatttcaacaagcataaaataaagctgggaggctcaaatatctttataacggttaaacagagaaaacagtaccgcaggctgaagaagctaatgtatgaggattctcaaagaccagtacctcgcccattaaacaagctccaaggattcatctttgatgtggtaacaagccaagcttttaatgtcattgttatggttcttatatgtttccaagcaatagccatgatgatagacactgatgttcagagtctacaaatgtccattgctctctactggattaactcaatttttgttatgctatatactatggaatgtatactgaagctcatcgctttccgttgtttttatttcaccattgcgtggaacatttttgattttatggtggttattttctccatcacaggactatgtctgcctatgacagtaggatcctaccttgtgcctccttcacttgtgcaactgatacttctctcacggatcattcacatgctgcgtcttggaaaaggaccaaaggtgtttcataatctgatgcttcctttgatgctgtccctcccagcattattgaacatcattcttctcatcttcctggtcatgttcatctatgccgtatttggaatgtataattttgcctatgttaaaaaagaagctggaattaatgatgtgtctaattttgaaacctttggcaacagtatgctctgtctttttcaagttgcaatatttgctggttgggatgggatgcttgatgcaattttcaacagtaaatggtctgactgtgatcctgataaaattaaccctgggactcaagttagaggagattgtgggaacccctctgttgggattttttattttgtcagttatatcctcatatcatggctgatcattgtaaatatgtacattgttgttgtcatggagtttttaaatattgcttctaagaagaaaaacaagaccttgagtgaagatgattttaggaaattctttcaggtatggaaaaggtttgatcctgataggacccagtacatagactctagcaagctttcagattttgcagctgctcttgatcctcctcttttcatggcaaaaccaaacaagggccagctcattgctttggacctccccatggctgttggggacagaattcattgcctcgatatcttacttgcttttacaaagagagttatgggtcaagatgtgaggatggagaaagttgtttcagaaatagaatcagggtttttgttagccaacccttttaagatcacatgtgagccaattacgactactttgaaacgaaaacaagaggcagtttcagcaaccatcattcaacgtgcttataaaaattaccgcttgaggcgaaatgacaaaaatacatcagatattcatatgatagatggtgacagagatgttcatgctactaaagaaggtgcctattttgacaaagctaaggaaaagtcacctattcaaagccagatctaataccacttaccacctcttttcatatttcttcacatatctgaaaaatgttgaaagcctaagccaggaataaaagaaaagtagagataataatcagttctttacaaccgatggtaattaagcttgtattcacaagacttcatgccaaattcactttttagcattatatctaacaaatcaagagaatccttaatattgctgcag

SEQ ID NO: 78 - DNA, 1255 bp, HUMAN
ctaaagatgaaacggctggtttgtgtgctcttggtgtgctcctctgcagtggcacagttgcataaagatcctaccctggatcaccactggcatctctggaagaaaacctatggcaaacaatacaaggaaaagaatgaagaagcagtacgacgtctcatctgggaaaagaatctaaagtttgtgatgcttcacaacctggagcattcaatgggaatgcactcatacgatctgggcatgaaccacctgggagacatgaccagtgaagaagtgatgtctttgacgagttccctgagagttcccagccagtggcagagaaatatcacatataagtcaaaccctaatcggatattgcctgattctgtggactggagagagaaagggtgtgttactgaagtgaaatatcaaggttcttgtggtgcttgctgggctttcagtgctgtgggggccctggaagcacagctgaagctgaaaacaggaaagctggtgactctcagtgcccagaacctggtggattgctcaactgaaaaatatggaaacaaaggctgcaatggtggcttcatgacaacggctttccagtacatcattgataacaagggcatcgactcagacgcttcctatccctacaaagccatggatcagaaatgtcaatatgactcaaaatatcgtgctgccacatgttcaaagtacactgaacttccttatgggagagaagatgtcctgaaagaagctgtggccaataaaggcccagtgtctgttggtgtagatgcgcgtcatccttctttcttcctctacagaagtggtgtctactatgaaccatcctgtactcagaatgtgaatcatggtgtacttgtggttggctatggtgatcttaatgggaaagaatactggcttgtgaaaaacagctggggccacaactttggtgaagaaggatatattcggatggcaagaaataaaggaaatcattgtgggattgctagctttccctcttacccagaaatctagaggatctctcctttttataacaaatcaagaaatatgaagcactttctcttaacttaatttttcctgctgtatccagaagaaataattgtgtcatgattaatgtgtatttactgtactaatagaaaatatagtttgaggccgggcactgtctggctcacgcctgtaatcccagtacttgggaggccaaggaggcatatcaacttgaggccaggagttaaagagcagcctggctaactgtgaaaccctctctact

SEQ ID NO: 79 - DNA, 889 bp, HUMAN
ctgcgcctctcttccccagacctgcgcgctactgcggctcgggcggtcgctcgcctggctctgctccatttgactgtctgtgtgcagtcgcagaacttcgaagagggttttgcgctccatccgtggcgtttcgcttttgttcggttttgttgtttatttcatttttttttttccggagagaggcgaggcggtggtccacacccgcccgaggaggaagatgtcaaacgtgagagtgtctaacgggagcccgagcctggagcggatggacgccagacaagcggatcaccccaagccttccgcctgcagaaatctcttcggcccggtcaatcatgaagaactaacccgggacttggagaagcactgccgggatatggaagaagcgagtcagcgcaagtggaatttcgactttcagaatcataagcccctggagggcagatacgaatggcaggaggtggagaggggcagcttgcccgagttctactacaggcccccgcgcccccccaagagcgcctgcaaggtgctggcgcaggagagccaggatgtcagcgggagccgccaggcggtgcctttaattgggtctcaggcaaactctgaggaccggcatttggtggaccaaatgcctgactcgtcagacaatcaggctgggttagcggagcagtgtccagggatgaggaagcgacctgctgcagaagattcttcttcgcaaaacaaaagggccaacagaacagaagaaaatgtttcagacggttccccgaacgctggcactgtggagcagacgcccaagaagcccggccttcgacgccagacgtaaacagctccgaattaagaatatttccttgtttattagatacatcactgctttatgaagcaaggaagatatacatgaaaa

SEQ ID NO: 80 - DNA, 1182 bp, HUMAN
tgcagcactcaccatggaatccccgattcagatcttccgcggggagcctggccctacctgcgccccgagcgcctgcctgccccccaacagcagcgcctggtttcccggctgggccgagcccgacagcaacggcagcgccggctcggaggacgcgcagctggagcccgcgcacatctccccggccatcccggtcatcatcacggcggtctactccgtagtgttcgtcgtgggcttggtgggcaactcgctggtcatgttcgtgatcatccgatacacaaagatgaagacagcaaccaacatttacatatttaacctggctttggcagatgctttagttactacaaccatgccctttcagagtacggtctacttgatgaattcctggccttttggggatgtgctgtgcaagatagtaatttccattgattactacaacatgttcaccagcatcttcaccttgaccatgatgagcgtggaccgctacattgccgtgtgccaccccgtgaaggctttggacttccgcacacccttgaaggcaaagatcatcaatatctgcatctggctgctgtcgtcatctgttggcatctctgcaatagtccttggaggcaccaaagtcagggaagacgtcgatgtcattgagtgctccttgcagttcccagatgatgactactcctggtgggacctcttcatgaagatctgcgtcttcatctttgccttcgtgatccctgtcctcatcatcatcgtctgctacaccctgatgatcctgcgtctcaagagcgtccggctcctttctggctcccgagagaaagatcgcaacctgcgtaggatcaccagactggtcctggtggtggtggcggttttcgtcgtctgctggactcccattcacatattcatcctggtggaggctctggggagcacctcccacagcacagctgctctctccagctattacttctgcatcgccttaggctataccaacagtagcctgaatcccattctctacgcctttcttgatgaaaacttcaagcggtgtttccgggacttctgctttccactgaagatgaggatggagcggcagagcactagcagagtccgaaatacagttcaggatcctgcttacctgagggacatcgatgggatgaataaaccagtatgactagtcgtggagatgtcttcgtacag

SEQ ID NO: 81 - DNA, 1507 bp, HUMAN
atggggcgcccactgcacctcgtcctgctcagtgcctccctggctggcctcctgctgctcggggaaagtctgttcatccgcagggagcaggccaacaacatcctggcgagggtcacgagggccaattcctttcttgaagagatgaagaaaggacacctcgaaagagagtgcatggaagagacctgctcatacgaagaggcccgcgaggtctttgaggacagcgacaagacgaatgaattctggaataaatacaaagatggcgaccagtgtgagaccagtccttgccagaaccagggcaaatgtaaagacggcctcggggaatacacctgcacctgtttagaaggattcgaaggcaaaaactgtgaattattcacacggaagctctgcagcctggacaacggggactgtgaccagttctgccacgaggaacagaactctgtggtgtgctcctgcgcccgcgggtacaccctggctgacaacggcaaggcctgcattcccacagggccctacccctgtgggaaacagaccctggaacgcaggaagaggtcagtggcccaggccaccagcagcagcggggaggcccctgacagcatcacatggaagccatatgatgcagccgacctggaccccaccgagaaccccttcgacctgcttgacttcaaccagacgcagcctgagaggggcgacaacaacctcaccaggatcgtgggaggccaggaatgcaaggacggggagtgtccctggcaggccctgctcatcaatgaggaaaacgagggtttctgtggtggaactattctgagcgagttctacatcctaacggcagcccactgtctctaccaagccaagagattcaaggtgagggtaggggaccggaacacggagcaggaggagggcggtgaggcggtgcacgaggtggaggtggtcatcaagcacaaccggttcacaaaggagacctatgacttcgacatcgccgtgctccggctcaagacccccatcaccttccgcatgaacgtggcgcctgcctgcctccccgagcgtgactgggccgagtccacgctgatgacgcagaagacggggattgtgagcggcttcgggcgcacccacgagaagggccggcagtccaccaggctcaagatgctggaggtgccctacgtggaccgcaacagctgcaagctgtccagcagcttcatcatcacccagaacatgttctgtgccggctacgacaccaagcaggaggatgcctgccagggggacagcgggggcccgcacgtcacccgcttcaaggacacctacttcgtgacaggcatcgtcagctggggagagggctgtgcccgtaaggggaagtacgggatctacaccaaggtcaccgccttcctcaagtggatcgacaggtccatgaaaaccaggggcttgcccaaggccaagagccatgccccggaggtcataacgtcctctccattaaagtgagatcccactcaaaaaaaaaaaaaaaaaaaaaaaaaaaaaa

SEQ ID NO: 82 - DNA, 3330 bp, HUMAN
ggatcctatgagcctgggaggtcaggactgcagtgagccatgattacaccactgcagtgcagcctgcgtgacaaaacgagaccctgtctctaaaaaatgagaaaaaaaaatggttgttaccaggcgataaagggaggggaaaacgggagttacttaatgagtatacagtttcagttttgcgagatgaacagaattctggaaattggttgaacaccgctgtgattgaactcactaccaaactctacacttaaaaatggttaagatggtacaatttgtatgtattttaccacaataaaaaataaaaaaaaggctgggcgagatgttcactcctgtaatcccagtacttggggaggctggggctgaaggatcgtttgagccctgaaggagtttgagaccagcctgagcaacataaggagaccccatctgtacacaaaattaaaacattagccaggcagagagctggtcacggtggctcacgtatgtaatcccagcactttgggaggccgaggcgggcgggcggatcacctgaggtcaggagtttgagaccagcctggccaacatagtgaaaccgtgaaaccccatctctactaaaaatacaaaaattagctgggcgtggtggtgccctcataatcccagccactcgggaggctgagacaggagaatcgcttgaactcaggaggtggaggttgcagtgagcctagatcacaccactgcagtccaaagcaagactccgtctcaaaaaaaaaaaaaattagcccggctgttgtctccagttattctggaggctaaggcaggaagattgctggagcctaggagatcaaagctgcagtgagctatgactgcgcctctgcactccaacctgggtgacagaggaagaccctgtctcaaaaaaataaataacattgaaaaggaactctcccaaaagtatcttattctttctccataggcctcagagaaccatggctactgccaagggaatcgccataggaatcgacctgggcaccacctactcctgtgtgggggtgttccagcacggcaaggtggagatcatcgccaacgaccagggcaaccgcaccacccccagctacgtggccttcacagacaccgagcggctcattggggatgcggccaagaaccaggtagcaatgaatccccagaacactgtttttgatgctaaacgtctgatcggcaggaaatttaatgatcctgttgtacaagcagatatgaaactttggccttttcaagtgattaatgaaggaggcaagcccaaagtccttgtgtcctacaaaggggagaataaagctttctaccctgaggaaatctcttcgatggtattgactaagttgaaggagactgctgaggcctttttgggccaccctgtcaccaatgcagtgattaccgtgccagcctatttcaatgactctcaacgtcaggctactaaggatgcaggtgtgattgctggacttaatgtgctaagaatcatcaatgagcccacggctgctgccattgcctatggtttagataaaggaggtcaaggagaacgacatgtcctgatttttgatctgggtggaggcacatttgatgtgtcaattctgaccatagatgatgggatttttgaggtaaaggccactgctggggacactcacctgggtggggaggactttgacaacaggcttgtgagccacttcgtggaggagttcaagaggaaacacaaaaaggacatcagccagaacaagcgagccgtgaggcggctgcgcaccgcctgcgagagggccaagaggaccctgtcgtccagcacccaggccaacctagaaattgattcactttatgaaggcattgacttctatacatccatcaccagagctcgatttgaagagttgtgtgcagacctgtttaggggtaccctggagcctgtagaaaaagcgcttcgggatgccaagatggataaggctaaaatccatgacattgttttagtagggggctccacccgcatccccaaggtgcagcggctgcttcaggactacttcaatggacgtgatctcaacaagagcatcaaccctgatgaggccgtagcatatggggctgcggtacaagcagccatcctgatgggggacaagtctgagaaggtacaggacctgctgctgctggacgtggctcccctgtccctgggtctggagacggttgggggcgtgatgactgccctgataaagcgcaactccaccatcccacccaagcagacacagattttcaccacctactctgacaaccaacccggggtgctgatccaggtgtatgagggcgagagggccatgacaaaggacaacaacctgctggggcggtttgatctgactggaatccctccagcacccaggggagttcctcagatcgaggtgacgtttgacattgatgccaatggtattctcaatgtcacagccacggacaagagcaccggcaaggtgaacaagatcaccatcaccaatgacaagggccgcctgagcaaggaggagattgagcggatggttctggatgctgagaaatataaagctgaagatgaggtccagagggagaaaattgctgcaaagaatgccttagaatcctatgcttttaacatgaagagtgttgtgagtgatgaaggtttgaagggcaagattagtgagtctgataaaaataaaatattggataaatgcaacgagctcctttcgtggctggaggtcaatcaactggcagagaaagatgagtttgatcataagagaaaggaattggagcagatgtgtaaccctatcatcacaaaactctaccaaggaggatgcactgggcctgcctgcggaacagggtatgtgcctggaaggcctgccacaggccccacaattgaagaagtagattaattctttttagaactgaagcatcctaggatgcctctacatgtatttcattcccctcatgttgaaacatcattattattcttgaccagacctgaatctaagttaccatcccttggaaattctggagaaggagtctcatgcaccacctatcacactccctcacatcctgtttctgactttggaatggactcaggaaaactaggcccctctttaaccgtgtgatgtatttgaatgtctgttatttccagccaccctaacattcttcttcctgtgtggatgcttatttgtcaatcagtaaatttgttcgtaaagaaaattacttctggtatttaggctgtgaatgtaccttgaaggggagagttcatggagagagcatgtgttctctgattgtgaggtcactgtgaatgattaaattggtaagggtaaagtatttgaattttcatgaact

SEQ ID NO: 83 - DNA, 2060 bp, HUMAN
tgttcccagcactcaagccttgccaccgccgagccgggcttcctgggtgtttcaggcaaggaagtctaggtccctggggggtgacccccaaggaaaaggcagcctccctgcgcacccggttgcccggagccctctccagggccggctgggctgggggttgccctggccagcaggggcccgggggcgatgccacccggtgccgactgaggccaccgcaccatggcccgctcgctgacctggcgctgctgcccctggtgcctgacggaggatgagaaggccgccgcccgggtggaccaggagatcaacaggatcctcttggagcagaagaagcaggaccgcggggagctgaagctgctgcttttgggcccaggcgagagcgggaagagcaccttcatcaagcagatgcggatcatccacggcgccggctactcggaggaggagcgcaagggcttccggcccctggtctaccagaacatcttcgtgtccatgcgggccatgatcgaggccatggagcggctgcagattccattcagcaggcccgagagcaagcaccacgctagcctggtcatgagccaggacccctataaagtgaccacgtttgagaagcgctacgctgcggccatgcagtggctgtggagggatgccggcatccgggcctgctatgagcgtcggcgggaattccacctgctcgattcagccgtgtactacctgtcccacctggagcgcatcaccgaggagggctacgtccccacagctcaggacgtgctccgcagccgcatgcccaccactggcatcaacgagtactgcttctccgtgcagaaaaccaacctgcggatcgtggacgtcgggggccagaagtcagagcgtaagaaatggatccattgtttcgagaacgtgatcgccctcatctacctggcctcactgagtgaatacgaccagtgcctggaggagaacaaccaggagaaccgcatgaaggagagcctcgcattgtttgggactatcctggaactaccctggttcaaaagcacatccgtcatcctctttctcaacaaaaccgacatcctggaggagaaaatccccacctcccacctggctacctatttccccagtttccagggccctaagcaggatgctgaggcagccaagaggttcatcctggacatgtacacgaggatgtacaccgggtgcgtggacggccccgagggcagcaagaagggcgcacgatcccgacgccttttcagccactacacatgtgccacagacacacagaacatccgcaaggtcttcaaggacgtgcgggactcggtgctcgcccgctacctggacgagatcaacctgctgtgacccaggccccacctggggcaggcggcaccggcgggcgggtgggaggtgggagtggctgcagggaccctagtgtcctggtctatctctccagcctcggcccacacgcaagggagtcgggggacggcccgctgctggccgctctcttctctgcctctcaccaggacagccgccccccagggtactcctgcccttgcttgactcagtttccctcctttgaaagggaaggagcaaaacggccatttgggatgccagggtggatgaaaaggtgaagaaatcaggggattgagacttgggtgggtgggcatctctcaggagccccatctccgggcgtgtcacctcctgggcagggttctgggaccctctgtgggtgacgcacaccctgggatggggctagtagagccttcaggcgccttcgggcgtggactctggcgcactctagtggacaggagaaggaacgccttccaggaacctgtggactaggggtgcagggacttccctttgcaaggggtaacagaccgctggaaaacactgtcactttcagagctcggtggctcacagcgtgtcctgccccggtttgcggacgagagaaatcgcggcccacaagcatcccccatcccttgcaggctgggggctgggcatgctgcatcttaaccttttgtatttattccctcaccttctgcagggctccgtgcgggctgaaattaaagatttcttag

SEQ ID NO: 84 - DNA, 550 bp, HUMAN
ggccggggttgactccgggggcgcggcgaggagagacatgaggctgagctggttccgggtcctgacagtactgtccatctgcctgagcgccgtggccagcacggggaccgagggcaaaaggaagctgcagatcggggtcaagaagcgggtggaccactgtcccatcaaatcgcgcaaaggggatgtcctgcacatgcactacacggggaagctggaagatgggacagagtttgacagcagcctgccccagaaccagccctttgtcttctcccttggcacaggccaggtcatcaagggctgggaccaggggctgctggggatgtatgagggggaaaagcgcaagctggtgatcccatccgagctagggtatggagagcggggagctcccccaaagattccaggcggtgcaaccctggtgttcgaggtggagctgctcaaaatagagcgacgaactgagctgtaaccagactgggaggggcaggggagaggcccccatcaggaccagactgttccaaaaaaaaaaaaacaaaaaacaaacaaaaaaacactt

SEQ ID NO: 85 - DNA, 1264 bp, HUMAN
tggtttgtggtttttatgaagagatgtgaaaaaggaagtgtggaatgatgggatgagaagttgtatggggaagatgaatagaagaattaggtggttgaataaaattaaaaggtgtgtggttggatgaatgaatgagtgggatgatagatggacctaagtggttagtggatggacaggaggatggatggatgtgagagccccagaaggacataaggaaagatgggtggatagatggatgggcggatggaaggatatttaggaggatgaatgagcatgtgtgtggagagaggtgcccattcacactggcttgaacacatgggttagctgagccaaatgccagccctatgacaggccatcagtagctttccctgagctgttctgccaagaagctaaaattcattcaagccatgtggacttgttattgaggggaaaaagaatgagctctccctctttccacttggaagattcaccaactccccacccctcactccccactgtgggcacggaggcactgcgccacccagggcaagacctcgccctctctccagctcctctcccaggatatccaacatccctgtgaaaccagagatcttgctccagccggattcagagaaatttagcgggaaaggagaggccaaaggctgaacccaatggtgcaaggttttacggttcggtcatcctctgtcctgacgccgcggggccagcgggagaagaaagccagtgcgtctctgggcgcaggggccagtggggctcggaggcacaggcaccccgcgacactccaggttccccgacccacgtccctggcagccccgattatttacagcctcagcagagcacggggcgggggcagaggggcccgcccgggagggctgctacttcttaaaacctctgcgggctgcttagtcacagccccccttgcttgggtgtgtccttcgctcgctccctccctccgtcttaggtcactgttttcaacctcgaataaaaactgcagccaacttccgaggcagcctcattgcccagcggaccccagcctctgccaggttcggtccgccatcctcgtcccgtcctccgccggcccctgccccgcgcccagggatcctccagctcctttcgcccgcgccctccgttcgctccggacaccatggacaagttttggtggcacgcagcctggggactctgcctcgtgccgctgagcctggcgcagatcggtgagtgcccgccgcaggctgggcagcaagatgggtgcggggtgctcagcgcggac

SEQ ID NO: 86 - DNA, 865 bp, HUMAN
gaattccggagttccgggcgcgcgcgacgtcagtttgagttctgtgttctccccgcccgtgtcccgcccgacccgcgcccgcgatgctggcgctgcgctgcggctcccgctggctcggcctgctctccgtcccgcgctccgtgccgctgcgcctccccgcggcccgcgcctgcagcaagggctccggcgacccgtcctcttcctcctcctccgggaacccgctcgtgtacctggacgtggacgccaacgggaagccgctcggccgcgtggtgctggagctgaaggcagatgtcgtcccaaagacagctgagaacttcagagccctgtgcactggtgagaagggcttcggctacaaaggctccaccttccacagggtgatcccttccttcatgtgccaggcgggcgacttcaccaaccacaatggcacaggcgggaagtccatctacggaagccgctttcctgacgagaactttacactgaagcacgtggggccaggtgtcctgtccatggctaatgctggtcctaacaccaacggctcccagttcttcatctgcaccataaagacagactggttggatggcaagcatgttgtgttcggtcacgtcaaagagggcatggacgtcgtgaagaaaatagaatctttcggctctaagagtgggaggacatccaagaagattgtcatcacagactgtggccagttgagctaatctgtggccagggtgctggcatggtggcagctgcaaatgtccatgcacccaggtggccgcgttgggctgtcagccaaggtgcctgaaacgatacgtgtgcccactccactgtcacagtgtgcctgaggaaggctgctagggatgttagacggaattcc

SEQ ID NO: 87 - DNA, 1551 bp, HUMAN
ctggtggcctttaatacctggctgttgctgaaaggtctttagaaacggcgctaacagcaggtttgtggaatgccggatcgctcaacggcctgacgtgggcaaaaacctcgccttccgcacccatcattatattgatgctcattgccgccgccttactggtacgccggatgcgcttgctggaaatgggacacacggtcactgcagctgaagccgctgcccctgctacaggcaccaccaggaccagctgatcattccagcccacagcaatggagccacatgactcctcccacatggactctgagttccgatacactctcttcccgattgtttacagcatcatctttgtgctcggggtcattgctaatggctacgtgctgtgggtctttgcccgcctgtacccttgcaagaaattcaatgagataaagatcttcatggtgaacctcaccatggcggacatgctcttcttgatcaccctgccactttggattgtctactaccaaaaccagggcaactggatactccccaaattcctgtgcaacgtggctggctgccttttcttcatcaacacctactgctctgtggccttcctgggcgtcatcacttataaccgcttccaggcagtaactcggcccatcaagactgctcaggccaacacccgcaagcgtggcatctctttgtccttggtcatctgggtggccattgtgggagctgcatcctacttcctcatcctggactccaccaacacagtgcccgacagtgctggctcaggcaacgtcactcgctgctttgagcattacgagaagggcagcgtgccagtcctcatcatccacatcttcatcgtgttcagcttcttcctggtcttcctcatcatcctcttctgcaacctggtcatcatccgtaccttgctcatgcagccggtgcagcagcagcgcaacgctgaagtcaagcgccgggcgctgtggatggtgtgcacggtcttggcggtgttcatcatctgcttcgtgccccaccacgtggtgcagctgccctggacccttgctgagctgggcttccaggacagcaaattccaccaggccattaatgatgcacatcaggtcaccctctgcctccttagcaccaactgtgtcttagaccctgttatctactgtttcctcaccaagaagttccgcaagcacctcaccgaaaagttctacagcatgcgcagtagccggaaatgctcccgggccaccacggatacggtcactgaagtggttgtgccattcaaccagatccctggcaattccctcaaaaattagtccctgcttccaggcctgaagtcttctcctccatgaacatcatggactgagctgggggaagaagggatatctactgtggtctgggcaccacctctgtgggcactggtgggccattagatttggaggctacctcacctgggcagggatgatggcagagccaggctgttggaaaatccagaactcaaatgagccccttcatccgcctgtggggcatactacagtaactgtgacttgatgactttatctgagtccttat

SEQ ID NO: 88 - DNA, 1071 bp, HUMAN
gcagttctggtcctcctaggagcggccgcctgcgcggcgcggccccgtggtcggatgctgggcggcagagaggccgaggcgcacgcgcggccctacatggcgtcggtgcagctgaacggcgcgcacctgtgcgcaggcgtcctggtggcggagcggtgggtgctgagcgcggcgcactgcctggaggacgcggccgacgggaaggtgcaggttctcctgggcgcgcactccctgtcgcagccggagccctccaagcgcctgtacgacgtgctccgcgcagtgccccacccggacagccagcccgacaccatcgaccacgacctcctgctgctacagctgtcggagaaggccacactgggccctgctgtgcgccccctgccctggcagcgcgtggaccgcgacgtggcaccgggaactctctgcgacgtggccggctggggcatagtcaaccacgcgggccgccgcccggacagcctgcagcacgtgctcttgccagtgctggaccgcgccacctgcaaccggcgcacgcaccacgacggcgccatcaccgagcgcttgatgtgcgcggagagcaatcgccgggacagctgcaagggtgactccgggggcccgctggtgtgcgggggcgtgctcgagggcgtggtcacctcgggctcgcgcgtttgcggcaaccgcaagaagcccgggatctacacccgcgtggcgagctatgcggcctggatcgacagcgtcctggcctagggtgccggggcctgaaggtcagggtcacccaagcaacaaagtcccgagcaatgaagtcatccactcctgcatctggttggtctttattgagcacctactatatgcagaaggggaggccgaggtgggaggatcattggatctcaggagttggagatcagcatgggccacgtagcgcgactccatctctacaaataaataaaaattagctgggcaattggcgggcatggaggtgggtgcttgtagttccagctactcaggaggctgaggtgggaggatgacttgaacgcaggaggctgaggctgcagtgagttgtgattgcaccactgccct

SEQ ID NO: 89 - DNA, 653 bp, HUMAN
acaggacacagctgggttctgaagcttctgagttctgcagcctcaccctctgagaaaacctcttttccaccaataccatgaagctctgcgtgactgtcctgtctctcctcatgctagtagctgccttctgctctccagcgctctcagcaccaatgggctcagaccctcccaccgcctgctgcttttcttacacccgagaagcttcctcgaactttgtggtagattactatgagaccagcagcctctgctcccagccagctgtggtattccaaaccaaaagaagcaagcaagtctgtgctgatcccagtgaatcctgggtccaggagtacgtgtatgacctggaactgaactgagctgctcagagacaggaagtcttcagggaaggtcacctgagcccggatgcttctccatgagacacatctcctccatactcaggactcctctccgcagttcctgtcccttctcttaatttaatcttttttatgtgccgtgttattgtattaggtgtcatttccattatttatattagtttagccaaaggataagtgtcccctatggatggtccactgtcactgtttctctgctgttgcaaatacatggataacacatttgattcgtgtgtgttttcataataaaactttaaaataaaatgc

SEQ ID NO: 90 - DNA, 775 bp, HUMAN
gaattcccgggcagcagacagtggtcagtcctttcttggctctgctgacactcgagcccacattccgtcacctgctcagaatcatgcaggtctccactgctgcccttgctgtcctcctctgcaccatggctctctgcaaccagttctctgcatcacttgctgctgacacgccgaccgcctgctgcttcagctacacctcccggcagattccacagaatttcatagctgactactttgagacgagcagccagtgctccaagcccggtgtcatcttcctaaccaagcgaagccggcaggtctgtgctgaccccagtgaggagtgggtccagaaatatgtcagcgacctggagctgagtgcctgaggggtccagaagcttcgaggcccagcgacctcggtgggcccagtggggaggagcaggagcctgagccttgggaacatgcgtgtgacctccacagctacctcttctatggactggttgttgccaaacagccacactgtgggactcttcttaacttaaattttaatttatttatactatttagtttttgtaatttattttcgatttcacagtgtgtttgtgattgtttgctctgagagttcccctgtcccctcccccttccctcacaccgcgtctggtgacaaccgagtggctgtcatcagcctgtgtaggcagtcatggcaccaaagccaccagactgacaaatgtgtatcggatgcttttgttcagggctgtgatcggcctggggaaataataaagatgctcttttaaaaggt

SEQ ID NO: 91 - DNA, 439 bp, HUMAN
ccgcagcatgagctccgcagccgggttctgcgcctcacgccccgggctgctgttcctggggttgctgctcctgccacttgtggtcgccttcgccagcgctgaagctgaagaagatggggacctgcagtgcctgtgtgtgaagaccacctcccaggtccgtcccaggcacatcaccagcctggaggtgatcaaggccggaccccactgccccactgcccaactgatagccacgctgaagaatggaaggaaaatttgcttggacctgcaagccccgctgtacaagaaaataattaagaaacttttggagagttagctactagctgcctacgtgtgtgcatttgctatatagcatacttcttttttccagtttcaatctaactgtgaaagaaacttctgatatttgtgttatccttatgattttaaataaacaaaataaatc

SEQ ID NO: 92 - DNA, 5191 bp, HUMAN
gaattcagtaacccaggcattattttatcctcaagtcttaggttggttggagaaagataacaaaaagaaacatgattgtgcagaaacagacaaacctttttggaaagcatttgaaaatggcattccccctccacagtgtgttcacagtgtgggcaaattcactgctctgtcgtactttctgaaaatgaagaactgttacaccaaggtgaattatttataaattatgtacttgcccagaagcgaacagacttttactatcataagaacccttccttggtgtgctctttatctacagaatccaagacctttcaagaaaggtcttggattcttttcttcaggacactaggacataaagccacctttttatgatttgttgaaatttctcactccatcccttttgctgatgatcatgggtcctcagaggtcagacttggtgtccttggataaagagcatgaagcaacagtggctgaaccagagttggaacccagatgctctttccactaagcatacaactttccattagataacacctccctcccaccccaaccaagcagctccagtgcaccactttctggagcataaacataccttaactttacaacttgagtggccttgaatactgttcctatctggaatgtgctgttctctttcatcttcctctattgaagccctcctattcctcaatgccttgctccaactgcctttggaagattctgctcttatgcctccactggaattaatgtcttagtaccacttgtctattctgctatatagtcagtccttacattgctttcttcttctgatagaccaaactctttaaggacaagtacctagtcttatctatttctagatcccccacattactcagaaagttactccataaatgtttgtggaactgatttctatgtgaagacatgtgccccttcactctgttaactagcattagaaaaacaaatcttttgaaaagttgtagtatgcccctaagagcagtaacagttcctagaaactctctaaaatgcttagaaaaagatttattttaaattacctccccaataaaatgattggctggcttatcttcaccatcatgatagcatctgtaattaactgaaaaaaaataattatgccattaaaagaaaatcatccatgatcttgttctaacacctgccactctagtactatatctgtcacatggtctatgataaagttatctagaaataaaaaagcatacaattgataattcaccaaattgtggagcttcagtattttaaatgtatattaaaattaaattattttaaagatcaaagaaaactttcgtcatactccgtatttgataaggaacaaataggaagtgtgatgactcaggtttgccctgaggggatgggccatcagttgcaaatcgtggaatttcctctgacataatgaaaagatgagggtgcataagttctctagtagggtgatgatataaaaagccaccggagcactccataaggcacaaactttcagagacagcagagcacacaagcttctaggacaagagccaggaagaaaccaccggaaggaaccattctcactgtgtgtaaacatgacttccaagctggccgtggctctcttggcagccttcctgatttctgcagctctgtgtgaaggtaagcacatctttctgacctacagcgttttcctatgtctaaatgtgatccttagatagcaaagctattcttgatgctttggtaacaaacatcctttttattcagaaacagaatataatcttagcagtcaattaatgttaaattgaagatttagaaaaaactatatataacacttaggaaatataaaggtttgatcaatatagatattctgcttttataatttataccaggtagcatgcatatatttaacgtaaataagtaatttatagtatgtcctattgagaaccacggttacctatattatgtattaatattgagttgagcaaggtaactcagacaattccactccttgtagtatttcattgacaagcctcagatttgtcattaattcctgtctggtttaaagataccctgattatagaccaggcatgtataacttatttatatatttctgttaattctttctgaaggcaatttctatgctggagagtcttagcttgcctactataaataacactgtggtatcacagaggattatgcaatattgaccagataaaaataccatgaagatgttgatattgtacaaaaagaactctaactcttatataggaagttgttcaatgttgtcagttatgactgttttttaaaacaaagaactaactgaggtcaagggctaggagatattcaggaatgagttcactagaaacatgatgccttccatagtctccaaataatcatattggaattagaaggaagtagctggcagagctgtgcctgttgataaaatcaatccttaatcactttttcccccaacaggtgcagttttgccaaggagtgctaaagaacttagatgtcagtgcataaagacatactccaaacctttccaccccaaatttatcaaagaactgagagtgattgagagtggaccacactgcgccaacacagaaattatgtaagtactttaaaaaagattagatattttgttttagcaaacttaaaattaaggaaggtggaaatatttaggaaagttccaggtgttaggattacagtagtaaatgaaacaaaacaaaataaaaatatttgtctacatgacatttaaatatggtagcttccacaactactataaatgttattttggacttagactttatgcctgacttaaggaatcatgatttgaatgcaaaaactaaatattaatctgaaccatttctttcttatttcagtgtaaagctttctgatggaagagagctctgtctggaccccaaggaaaactgggtgcagagggttgtggagaagtttttgaagaggtaagttatatattttttaatttaaatttttcatttatcctgagacatataatccaaagtcagcctataaatttctttctgttgctaaaaatcgtcattaggtatctgcctttttggttaaaaaaaaaggaatagcatcaatagtgagtttgttgtacttatgaccagaaagaccatacatagtttgcccaggaaattctgggtttaagcttgtgtcctatactcttagtaaagttctttgtcactcccagtagtgtcctattttagatgataatttctttgatctccctatttatagttgagaatatagagcatttctaacacatgaatgtcaaagactatattgacttttcaagaaccctactttccttcttattaaacatagctcatctttatatttttaattttattttagggctgagaattcataaaaaaattcattctctgtggtatccaagaatcagtgaagatgccagtgaaacttcaagcaaatctacttcaacacttcatgtattgtgtgggtctgttgtagggttgccagatgcaatacaagattcctggttaaatttgaatttcagtaaacaatgaatagtttttcattgtaccatgaaatatccagaacatacttatatgtaaagtattatttatttgaatctacaaaaaacaacaaataatttttaaatataaggattttcctagatattgcacgggagaatatacaaatagcaaaattgggccaagggccaagagaatatccgaactttaatttcaggaattgaatgggtttgctagaatgtgatatttgaagcatcacataaaaatgatgggacaataaattttgccataaagtcaaatttagctggaaatcctggatttttttctgttaaatctggcaaccctagtctgctagccaggatccacaagtccttgttccactgtgccttggtttctcctttatttctaagtggaaaaagtattagccaccatcttacctcacagtgatgttgtgaggacatgtggaagcactttaagttttttcatcataacataaattattttcaagtgtaacttattaacctatttattatttatgtatttatttaagcatcaaatatttgtgcaagaatttggaaaaatagaagatgaatcattgattgaatagttataaagatgttatagtaaatttattttattttagatattaaatgatgttttattagataaatttcaatcagggtttttagattaaacaaacaaacaattgggtacccagttaaattttcatttcagatatacaacaaataattttttagtataagtacattattgtttatctgaaattttaattgaactaacaatcctagtttgatactcccagtcttgtcattgccagctgtgttggtagtgctgtgttgaattacggaataatgagttagaactattaaaacagccaaaactccacagtcaatattagtaatttcttgctggttgaaacttgtttattatgtacaaatagattcttataatattatttaaatgactgcatttttaaatacaaggctttatatttttaactttagtgtttttatgtgctctccaaattttttttactgtttctgattgtatggaaatataaaagtaaatatgaaacatttaaaatataatttgttgtcaaagtaatcaagtgtttgtcttttttttagttttagcttattgggattctctttgtttatatttaaaattatactttgatttagaaaacataaatgcttccccttagcattttgttatggaaaattacaaacttttatttttagaaaacagaactcctttccagaaataggttacaaacagtagtgtcctccacagaatgttggaaatgttttcaactccccactgtatactatcttgctaataagtctgtcttcagatttcgattaaccggtttgtatgtctgtgcactttagcatagctggacattaaagaggaaagagagtacatattataagttgcttatcagtaactgaggagtaaaactgataaatgtgaggcaaagaagtttaaaatatggttaaagcctaagcatatttgcaaacaaatcaaacaatactctgagaagtaaaaacataattatttaattaacaaatttcagtggataaattttataacaaattagacacagttgaaaataaaattagaaaactagaaaatagaacaaaagaaacttctggaattca

SEQ ID NO: 93 - DNA, 4206 bp, HUMAN
gtcgacaccacccaaaatagtgccgagcctcttggggggggaggggctgggagtgggggccctgagtgagagcaacgagggtgtgaccagcgccgcccggacccctagtcccctcccccgcacactcttcagctgtcgcagggggcctgagaggacagctgagggtcctggctgggaacgagctggggagggggagctggtggtgcctggggcatgaagaggcctcgctgagaccctcacaaacggtttgcacgtttccacacctcattttctcctcttcggtggcaggcactgtgcacccaattcctaaagcactcctggatttaatgttctgagagccacatagaacgaaagatgcaagaaatctgtttgctcttttttcagggggtggggtctttctgcccagatgtgggatcctctcctaaacccaggtcaacccagggcacgaggcagatggctggtgctgacatgttgaccatcactgctctcttccaaggactcacaaagagttaatgtccctggggctcagcctaggaagattccagtccctgcccaggcccaagatagttgctggcctgattcccctggcattcaggactggaaaggaggaggaggggcacactacgccggctcccatcctccccccaccccgcgtgcctgcttgggattcctgactctgtaccagcttcagagaacaggggtgggggtgggtgccattgggtgtggacagaaagctagtgaaacaagaccatgacaagtcactggccggctcagacgtgtttgtgtctctcttttcttagctcagtgagtactgggtatgtgtcacattgccaaatcccggatcacaagtctccatgaactgctggtgagctaggataataaaacccctgacatcaccattccagaagcttcacaagactgcatatataaggggctggctgtagctgcagctgaaggagctgaccagccagctgacccctcacactcacctagccaccatggacatcgccatccaccacccctggatccgccgccccttctttcctttccactcccccagccgcctctttgaccagttcttcggagagcacctgttggagtctgatcttttcccgacgtctacttccctgagtcccttctaccttcggccaccctccttcctgcgggcacccagctggtttgacactggactctcagaggtgagtctccccacagctaggacgggagagtccttactggaacctcctggaaacttctccatccattttcctttcctaccctgcctaaaccattttaggcacatgtgtgtccaaatgtgaagaaaaatgaggaggttgctagtgccttcctcccccatcacctgtttctatttgatagtcctctgtatcccatttattacattttttcatgcactgtcaagtttatcctccgtcccctaacttctctacaggatacccctttctggtttggttcatgacaatctgcagggaaagagctgccttcaaactcctttgcttatctcttccaacaccttggactcttgaccgattttaccatctcaggtttcagagccaggagagagccctgcctcatcctgagctgttcatccccatgggtattttctgcctttctattccctcttctatgattttctgggtttctcagggctacgacagggcgctggcctgggtccaatcaagccctacgaggaaacaatatagggacgcccatttgtcctaagagggtggaagaacagggtgaacaaataaggttgacagagctgtcacagataacactctggtttaaaaatattcaagtgtgagtaaacaggagctgagtgggcaagggctttggaaggacaagcaggaccagcagaacattccagattgggtgggtggaaaactggcaaagagacctgagccagaagaagaggcctttgtctcacagacaaaccacaaagccaggcattggagtcagagaggcagcagatgccaggcttgcacccatccttgcgactggtcccctgggtgatctgtcttcttctctgtccctgtaaataaagtttgggtctgatcaccatgagccttaggtatcactgtggtggctccctgaagcagacagctatgtttatttaaaaaggagattttttaagcagagaagagaaggatgaattacccggacagaaagcagctctgcagaataagacagcacctgtgtaatcagtatttttgccctctttctcccatcccattcccttaccttgctatttctagatgcgcctggagaaggacaggttctctgtcaacctggatgtgaagcacttctccccagaggaactcaaagttaaggtgttgggagatgtgattgaggtgcatggaaaacatgaagagcgccaggtatgtagcttgtttttttgttttctgctcattcattcagtgatactgtaatagtccaggtagtgctatcagctttggaggctggctacattccagtcccaagccataacagtcgggatcaggggttacaaatcaatgtctagaagactaagttaggatagacatattgctgttgttactattatggccagagatgtggcctttgatttgatcgccttagatgggatgatgggatgctgatgccccatttaagccagtggttctgaatctgggccacattagaatcaccaggggaactttcaaaaacctaatgctcgggcatcctccagaccaattagcatatgtgctgccgaagcgagcactactccagaccaattaaatcagcatttttaagggtgggacccaggcatcagcaatttttaaggtaattctaatctacagtcaaggttgagaaccactgattaggtatagggctgtcagacacctagttgctttgcataattacattaactacaggtaccctaaaagcacttgagttgtgacttctcttttagctgtgcaagaatccgtgtctcttctttagcccatcttaatgctgaactacttggtttgtctaaatttcagagctgtgctcagtctttaatcccctacagcccatgtggtaatcagttaacgagagcctgtttggctacatgcttgagagtcagcaggcatacgggttaaggtcatctactctttgggggagttctgacaaatggaacagcttgttatgactttataagagggctttaaaattgcttctcaccatttaacgatagctcagaacctgtgcgtcaaccagtacagtttgtcctcagtaatgtcctcaggctgtttcaattttgcttatatgatttaggtttgggtcatagtctccttggatggagtcatttttttttttttttaatttcagcagcagtcctattgttctggaaccttctgggacattcctgaagagtcaggacaatttcagggcttcctcagggactcagattctaaatgagattccaaattctgtaggcccagccaacattgatctaaacctttgggaaatacccctaaacatatctatgcctcagggtttgaaaaacaatgaagtgttggactgtttcagacttctcagattctcactggtaggagtgactacctaggcaatttcatcttagctgcaaccctgaaacgaagctctatttatttttcctatgttgtcatggcatttggtctcacctaaggggaaatcaggatgcctgagttctgggcaggtgataatagttcctgttcttatctctctgcctctttcctcattcttttgggttaggatgaacatggtttcatctccagggagttccacaggaaataccggatcccagctgatgtagaccctctcaccattacttcatccctgtcatctgatggggtcctcactgtgaatggaccaaggaaacaggtctctggccctgagcgcaccattcccatcacccgtgaagagaagcctgctgtcaccgcagcccccaagaaatagatgccctttcttgaattgcattttttaaaacaagaaagtttccccaccagtgaatgaaagtcttgtgactagtgctgaagcttattaatgctaagggcaggcccaaattatcaagctaataaaatatcattcagcaacagataactgtcttgtgtttgaatattccacacacttttaaataaatatacagataccacagatctatttatgattgcattatgatttagagggctccaaggattttagagt

SEQ ID NO: 94 - DNA, 6192 bp, HUMAN
agaggctgcggtgagtccgccagccccagctgctcctcctcaagcccccaaggcccttcggcgggcccctgctgaaagaccggcatgccctattctgtgggcttccgcgaagccgatgctgctaccagctttctgagagcagcaagatcaggtaacttggacaaagctttggatcacctgcggaatggggtagatattaacacctgtaaccagaatgggttgaatggcttgcatctggcttctaaggaaggccatgtgaaaatggtggttgaacttctgcacaaagaaatcattctagaaacgacaaccaagaaggggaacacggccctgcacatcgctgctctagccgggcaggatgaggtggtccgggagcttgtcaactatggagccaacgtcaatgcccagtcacagaaaggttttacacccctgtacatggcagcacaagagaaccacttggaagtggttaagtttttactggaaaatggagctaaccagaatgtagccacagaagacggcttcacgcctctggcggtagccctgcagcagggccatgagaacgtcgtcgcgcacctcatcaactacggcaccaaggggaaggtgcgcctcccggccctgcacatcgcggcccgcaacgacgacacgcgcacggctgcggtgctgctgcagaacgaccccaacccggacgtgctttccaagacgggattcacgcccctgcacattgcggctcactacgagaacctcaacgtggcccagttgctcctcaacagaggcagcagcgtcaatttcacaccacagaacggcatcacgccactgcacatcgcctcccgcaggggcaacgtgatcatggtgcggctgctgctggatcggggagcccagatagaaaccaagaccaaggacgaattgacacctctccactgtgcagctcgaaatgggcacgtgcgaatctcagagatcctgctggaccacggggcaccaatccaagccaaaaccaagaacggcctgtccccaattcacatggcggctcagggagaccacctcgactgtgtccggctcctgttgcaatacgacgcagagatagacgacatcaccctggaccacctgaccccactccacgtggctgcccactgtggacaccacagggtggctaaggtccttctggataaaggggccaaacccaactccagagccctgaatggctttacccccttacacatcgcctgcaaaaagaaccacgtccgtgtcatggagctgctgctgaagacgggagcctcgatcgacgcggtcaccgagtctggcctgacacctctccacgtggcctccttcatggggcaccttcccatcgtgaagaacctcctgcagcggggggcgtcgcccaacgtctccaacgtgaaagtggagaccccgctacacatggcagccagagccgggcacacggaagtggccaaatatttactccagaacaaagccaaagtcaatgccaaggccaaggatgaccagaccccacttcactgtgcagctcgcatcggccacacaaacatggtgaagctcctgctggaaaataacgccaaccccaacctggccaccaccgccgggcacacccccctgcacattgcagcccgtgagggccatgtggaaacagtcctggcccttctggaaaaggaagcatcccaggcctgcatgaccaagaaaggatttacccctctgcacgtggcggccaagtacgggaaggtgcgggtggcagagctgctgctggagcgggacgcacacccgaatgctgccggaaaaaatggcctgacccccctgcacgtggccgtccatcacaacaacctggacatcgtcaagctgctgcttccccggggcggctccccgcacagccctgcctggaatggctacacccctttgcacatcgctgccaagcagaaccaggtggaggtggcccgtagtctgctgcagtatgggggctcagcaaacgccgagtcggtgcaaggtgtgacgccccttcacctggccgcccaggagggccacgcagagatggtggctctgctgctctcgaaacaagccaatggcaacctggggaacaagagcggactcactcccctccatctggtagcacaagaaggccacgttccagtggcagatgtgctgatcaaacacggcgtcatggtggacgccaccacccggatgggctacactcccctccatgtggccagtcactatggaaacatcaagctggtgaagtttctgctgcagcaccaggcagatgtcaatgccaagaccaagctaggatacagccccctgcaccaggcagcccagcagggacacacagacatcgtgactctgcttctgaaaaacggtgcttccccaaacgaggtcagctcggatggaaccacacctctggccatagccaagcgcttgggctacatttctgtcaccgacgtgctcaaggtcgtcacggatgaaaccagtttcgtgttagtcagtgataagcatcgaatgagtttccctgagacagttgatgagatcctggatgtctcggaagatgaaggggaagaactcatcagcttcaaggctgagaggcgggattccagggatgttgatgaagagaaggagctgctggattttgtgccgaagctagaccaagtggtggaatctccagccatccccaggattccctgtgccatgcctgagacagtggtgatcaggtcagaagagcaggagcaggcatctaaagagtatgatgaggactccctcatccccagcagcccggccaccgagacctcagacaacatcagcccggtggccagcccggtgcatacagggtttctggtgagcttcatggttgacgcccggggtggttccatgagaggaagtcgccacaacggcctgcgagtggtgatcccgccacggacgtgcgcagcgcccacccgcatcacctgccgcctggtcaagccccagaagctcagcacgccgcccccactggccgaggaggagggcctggccagcaggatcatagcactggggcccacgggcgcacagttcctgagccctgtaatcgtggagatcccgcactttgcctcccatggccgtggagaccgcgagctcgtggttctgaggagcgaaaacggctccgtgtggaaggagcacaggagccgctatggagagagctacctggatcagatcctcaacgggatggacgaagagctggggagcctggaggagctagagaagaagagggtgtgccgaatcatcaccaccgacttcccgctgtacttcgtgatcatgtcacggctctgccaggactacgacatcatcggtcccgaagggggctccctgaagagcaagctggtgcccctggtacaggcaacgttcccggagaatgccgtcaccaagagagtgaagctggctctgcaggcccagcctgtcccggatgagcttgtcactaagctcctgggcaaccaggccacattcagccccattgtcaccgtggagccccggcgccggaagttccaccgccccattgggcttcggatcccactacctccttcctggaccgacaacccgagggacagtggggagggagacaccaccagcctgcgcctgctttgcagcgtcattggaggaacagaccaagcccagtgggaagacataacaggaaccaccaaacttgtatatgccaacgagtgcgccaacttcaccaccaatgtctctgccaggttttggctgtcggactgtcctcggactgctgaggctgtgaactttgccaccctgctgtacaaagagctcactgcagtgccctacatggccaaattcgtcatctttgccaagatgaatgacccccgagaggggcgcctgcgctgctactgcatgacagatgataaagtggacaagaccctggagcagcatgagaacttcgtggaggtggcccggagcagggacatagaggtgttggaaggaatgtccctgtttgcagaactctctgggaacctggtgcctgtgaagaaagctgcccagcagcggagcttccacttccagtcatttcgggagaaccgtctggccatgcctgtaaaggtgagggacagcagtcgagagccgggagggtccctgtcgtttctgcgcaaggcgatgaagtacgaggacacccagcacattctctgccacctgaacatcaccatgcccccctgcgctaagggaagtggagccgaagataggagaaggaccccgacgcccctggccctgcgatacagcattctcagtgagtccacaccaggttctctcagtgggacagagcaggcagagatgaagatggctgttatctcagagcacctcggtctcagctgggcagagttggcccgggagctgcagttcagtgtggaagacatcaacaggatccgagtggaaaatcccaactccctgttggagcagagtgtggccttgctgaacctctgggtcatccgtgaaggccaaaacgcaaacatggagaatctgtacacagccctgcagagcattgaccgtggcgagatcgtgaacatgctggagggttccggccgacagagccgcaacttgaagccagacaggcggcacaccgaccgcgactactcgctgtcaccctcccagatgaatggttactcctcactgcaggacgagctgctgtcccctgcctccctgggctgtgcactttcctctccgctacgtgcagaccagtactggaatgaggtggccatcctagacgccatccccttggcggccacggagcatgacaccatgctggagatgtctgacatgcaggtgtggtctgcgggcctcacgccttctctggtcactgctgaggactcctctctggagtgtagcaaggctgaggactctgatgccacaggtcacgagtggaagttggagggggcactctcagaggaaccgcggggccccgagttgggctctctggaacttgtggaggacgacacagtggattcagatgccacaaatggccttatcgatttgcttgaacaggaggaaggtcagaggtcagaagagaagctgccaggttctaagaggcaggatgacgcgacaggtgcagggcaggactcagagaatgaagtgtctcttgtttcaggccatcagagggggcaagcccgaatcacacattcccccaccgtgagtcaggtgacggagaggagtcaggacagactgcaggactgggatgcagacggctcgattgtctcatacctgcaagatgctgcacaaggttcctggcaagaggaggtcacgcaaggtccacactcattccagggaacaagtaccatgactgaagggctagagcccggtggatctcaggagtacgagaaggtcctggtgtctgtaagtgagcacacgtggacagaacagcccgaggctgagagctcccaggccgacagggaccggaggcagcaaggccaagaagagcaggtgcaggaggccaagaacaccttcacccaagtggtgcaggggaatgagtttcagaatattccaggggagcaggtgacagaggagcaattcacggatgagcagggcaacattgtcaccaagaagatcattcgcaaggtggttcgacagatagacttgtccagcgccgatgccgcccaggagcacgaggaggtggagctgagagggagtggcctacagccggacctgatagagggcaggaagggggcgcagatagtgaagcgggccagcctgaaaagggggaaacagtgaccccgagccgctctccttggagtagcctctcgggaggatcacacctcgacacccaacccctgaaccccacacactctgccatgcacacaggaggagagctggacctgagggccaccgcagcggtgcacacattcctctgggctgacggcatgacctctgtaagggactcctgctagtcccctcttggcatgaatgactgactgtagacgcatgacctccaggcttcaatcctgcctcttgcaatgacagctgatctgtcggaaccaggacacaaaagcagcaagaagcggggagagagagggatagaaaacaagcgcaggagagcctgcgaacgcaaaagtgaatgagggctttttgtggctggggatgggttttggttttggggttttttttttaaattgttttgacttcgtacagggtactttttcccggcctcatctgtcagaaatccatgtgggcttcctg

SEQ ID NO: 95 - DNA, 681 bp, HUMAN
gaattcagttcaatgtttacacaatcctacagttctgctaggcttctatgatgctactattctgcatttgaatgagcaaatggatttaatgcattgtcagggagccggccaaagcttgagagctccttcctggctgggaggccccttggaatgtggcctgaaggtaagctggcagcgagcctgacatgctttcatctagtttcctcgcttccttccttttctgcagttttcgcttcacagaaagcagaatccttaaaaataaccctcttagttcacatctgtggtcagtctgggcttaatggcaccccatcctccccatttgctcatttggtctcagcagtgaatggaaaaagtgtctcgtcctgaccccctgcttccctttcctacttcctggaaatccacaggatgctgcatttgctcagcagatttaacagcccacttatcactcatggaagatccctcctcctgcttgactccgccctctctccctctgcccgctttcaataagaggcagagacagcagccagaggaaccgagaggctgagactaacccagaaacatccaattctcaaactgaagctcgcactctcgcctccagcatgaaagtctctgccgcccttctgtgcctgctgctcatagcagccaccttcattccccaagggctcgctcagccaggtaggc

SEQ ID NO: 96 - DNA, 128 bp, HUMAN
tccagatgcaatcaatgccccagtcacctgctgctataacttcaccaataggaagatctcagtgcagaggctcgcgagctatagaagaatcaccagcagcaagtgtcccaaagaagctgtgatgtgag

SEQ ID NO: 97 - DNA, 482 bp, HUMAN
cacagcttcaagaccattgtggccaaggagatctgtgctgaccccaagcagaagtgggttcaggattccatggaccacctggacaagcaaacccaaactccgaagacttgaacactcactccacaacccaagaatctgcagctaacttattttcccctagctttccccagacaccttgttttattttattataatgaatttgtttgttgatgtgaaacattatgccttaagtaatgttaattcttatttaagttattgatgttttaagtatctttcatggtactagtgttttttagatacagagacttggggaaattgcttttcctcttttgaaccacagttctacccctgggatgttttgagggtctttgcaagaatcattaatacaaagaattttttttaacattccaatgcattgctaaaatattattgtggaaatgaatattttgtaactattacaccaaataaatatatttttgtac

SEQ ID NO: 98 - DNA, 3328 bp, HUMAN
ccggccgcggagctcttgcgaccccgccaggacccgaacagagcccgggggcggcgggccggagccggggacgcgggcacacgcccgctcgcacaagccacggcggactctcccgaggcggaacctccacgccgagcgagggtcagtttgaaaaggaggatcgagctcactgtggagtatccatggagatgtggagccttgtcaccaacctctaactgcagaactgggatgtggagctggaagtgcctcctcttctgggctgtgctggtcacagcaacactctgcaccgctaggccgtccccgaccttgcctgaacaagatgctctcccctcctcggaggatgatgatgatgatgatgactcctcttcagaggagaaagaaacagataacaccaaaccaaaccccgtagctccatattggacatccccagaaaagatggaaaagaaattgcatgcagtgccggctgccaagacagtgaagttcaaatgcccttccagtgggaccccaaaccccacactgcgctggttgaaaaatggcaaagaattcaaacctgaccacagaattggaggctacaaggtccgttatgccacctggagcatcataatggactctgtggtgccctctgacaagggcaactacacctgcattgtggagaatgagtacggcagcatcaaccacacataccagctggatgtcgtggagcggtcccctcaccggcccatcctgcaagcagggttgcccgccaacaaaacagtggccctgggtagcaacgtggagttcatgtgtaaggtgtacagtgacccgcagccgcacatccagtggctaaagcacatcgaggtgaatgggagcaagattggcccagacaacctgccttatgtccagatcttgaagactgctggagttaataccaccgacaaagagatggaggtgcttcacttaagaaatgtctcctttgaggacgcaggggagtatacgtgcttggcgggtaactctatcggactctcccatcactctgcatggttgaccgttctggaagccctggaagagaggccggcagtgatgacctcgcccctgtacctggagatcatcatctattgcacaggggccttcctcatctcctgcatggtggggtcggtcatcgtctacaagatgaagagtggtaccaagaagagtgacttccacagccagatggctgtgcacaagctggccaagagcatccctctgcgcagacaggtaacagtgtctgctgactccagtgcatccatgaactctggggttcttctggttcggccatcacggctctcctccagtgggactcccatgctagcaggggtctctgagtatgagcttcccgaagaccttcgctgggagctgcctcgggacagactggtcttaggcaaacccctgggagagggctgctttgggcaggtggtgttggcagaggctatcgggctggacaaggacaaacccaaccgtgtgaccaaagtggctgtgaagatgttgaagtcggacgcaacagagaaagacttgtcagacctgatctcagaaatggagatgatgaagatgatcgggaagcataagaatatcatcaacctgctgggggcctgcacgcaggatggtcccttgtatgtcatcgtggagtatgcctccaagggcaacctgcgggagtacctgcaggcccggaggcccccagggctggaatactgctacaaccccagccacaacccagaggagcagctctcctccaaggacctggtgtcctgcgcctaccaggtggcccgaggcatggagtatctggcctccaagaagtgcatacaccgagacctggcagccaggaatgtcctggtgacagaggacaatgtgatgaagatagcagactttggcctcgcacgggacattcaccacatcgactactataaaaagacaaccaacggccgactgcctgtgaagtggatggcacccgaggcattatttgaccggatctacacccaccagagtgatgtgtggtctttcggggtgctcctgtgggagatcttcactctgggcggctccccataccccggtgtgcctgtggaggaacttttcaagctgctgaaggagggtcaccgcatggacaagcccagtaactgcaccaacgagctgtacatgatgatgcgggactgctggcatgcagtgccctcacagagacccaccttcaagcagctggtggaagacctggaccgcatcgtggccttgacctccaaccaggagtacctggacctgtccatgcccctggaccagtactcccccagctttcccgacacccggagctctacgtgctcctcaggggaggattccgtcttctctcatgagccgctgcccgaggagccctgcctgccccgacacccagcccagcttgccaatggcggactcaaacgccgctgactgccacccacacgccctccccagactccaccgtcagctgtaaccctcacccacagcccctgctgggcccaccacctgtccgtccctgtcccctttcctgctggcaggagccggctgcctaccaggggccttcctgtgtggcctgccttcaccccactcagctcacctctccctccacctcctctccacctgctggtgagaggtgcaaagaggcagatctttgctgccagccacttcatcccctccagatgttggaccaacacccctccctgccaccaggcatctgccggatgggcagagtggagcaatgaacaggcatgcaagtgagagcttcctgagctttctcctgtcggtttggtctgttttgccttcacccataagcccctcgcactctggtggcaggtgcttgtcctcagggctacagcagtagggaggtcagtgcttcgtgcctcgattgaaggtgacctctgccccagataggtggtgccagtggcttattaattccgatactagtttgctttgctgaccaaatgcctggtaccagaggatggtgaggcgaaggccaggttgggggcagtgttgtgccctggcccagccaaactgggggctctgtgggggctctgtatatagctatgaagaaaacacaaagtgtataaatctgagtatatatttacatgtctttttaaaagggtcgttaccagagatttacccatcgggtaagatgctcctggtggctgggaggcatcagttgctatatattaaaaacaaaaaagaaaaaaaaggaaaatgtttttaaaaaggtcatatattttttgctacttttgctgttttatttttttaaattatgttctaaacctattttcagtttaggtccctcaataaaaattgctgctgcttaaaaacc

SEQ ID NO: 99 - DNA, 4788 bp, HUMAN
tttttagaaaaaaaaaatatatttccctcctgctccttctgcgttcacaagctaagttgtttatctcggctgcggcgggaactgcggacggtggcgggcgagcggctcctctgccagagttgatattcactgatggactccaaagaatcattaactcctggtagagaagaaaaccccagcagtgtgcttgctcaggagaggggagatgtgatggacttctataaaaccctaagaggaggagctactgtgaaggtttctgcgtcttcaccctcactggctgtcgcttctcaatcagactccaagcagcgaagacttttggttgattttccaaaaggctcagtaagcaatgcgcagcagccagatctgtccaaagcagtttcactctcaatgggactgtatatgggagagacagaaacaaaagtgatgggaaatgacctgggattcccacagcagggccaaatcagcctttcctcgggggaaacagacttaaagcttttggaagaaagcattgcaaacctcaataggtcgaccagtgttccagagaaccccaagagttcagcatccactgctgtgtctgctgcccccacagagaaggagtttccaaaaactcactctgatgtatcttcagaacagcaacatttgaagggccagactggcaccaacggtggcaatgtgaaattgtataccacagaccaaagcacctttgacattttgcaggatttggagttttcttctgggtccccaggtaaagagacgaatgagagtccttggagatcagacctgttgatagatgaaaactgtttgctttctcctctggcgggagaagacgattcattccttttggaaggaaactcgaatgaggactgcaagcctctcattttaccggacactaaacccaaaattaaggataatggagatctggttttgtcaagccccagtaatgtaacactgccccaagtgaaaacagaaaaagaagatttcatcgaactctgcacccctggggtaattaagcaagagaaactgggcacagtttactgtcaggcaagctttcctggagcaaatataattggtaataaaatgtctgccatttctgttcatggtgtgagtacctctggaggacagatgtaccactatgacatgaatacagcatccctttctcaacagcaggatcagaagcctatttttaatgtcattccaccaattcccgttggttccgaaaattggaataggtgccaaggatctggagatgacaacttgacttctctggggactctgaacttccctggtcgaacagttttttctaatggctattcaagccccagcatgagaccagatgtaagctctcctccatccagctcctcaacagcaacaacaggaccacctcccaaactctgcctggtgtgctctgatgaagcttcaggatgtcattatggagtcttaacttgtggaagctgtaaagttttcttcaaaagagcagtggaaggacagcacaattacctatgtgctggaaggaatgattgcatcatcgataaaattcgaagaaaaaactgcccagcatgccgctatcgaaaatgtcttcaggctggaatgaacctggaagctcgaaaaacaaagaaaaaaataaaaggaattcagcaggccactacaggagtctcacaagaaacctctgaaaatcctggtaacaaaacaatagttcctgcaacgttaccacaactcacccctaccctggtgtcactgttggaggttattgaacctgaagtgttatatgcaggatatgatagctctgttccagactcaacttggaggatcatgactacgctcaacatgttaggagggcggcaagtgattgcagcagtgaaatgggcaaaggcaataccaggtttcaggaacttacacctggatgaccaaatgaccctactgcagtactcctggatgtttcttatggcatttgctctggggtggagatcatatagacaatcaagtgcaaacctgctgtgttttgctcctgatctgattattaatgagcagagaatgactctaccctgcatgtacgaccaatgtaaacacatgctgtatgtttcctctgagttacacaggcttcaggtatcttatgaagagtatctctgtatgaaaaccttactgcttctctcttcagttcctaaggacggtctgaagagccaagagctatttgatgaaattagaatgacctacatcaaagagctaggaaaagccattgtcaagagggaaggaaactccagccagaactggcagcggttttatcaactgacaaaactcttggattctatgcatgaagtggttgaaaatctccttaactattgcttccaaacatttttggataagaccatgagtattgaattccccgagatgttagctgaaatcatcaccaatcagataccaaaatattcaaatggaaatatcaaaaaacttctgtttcatcaaaagtgactgccttaataagaatggttgccttaaagaaagtcgaattaatagcttttattgtataaactatcagtttgtcctgtagaggttttgttgttttattttttattgttttcatctgttgttttgttttaaatacgcactacatgtggtttatagagggccaagacttggcaacagaagcagttgagtcgtcatcacttttcagtgatgggagagtagatggtgaaatttattagttaatatatcccagaaattagaaaccttaatatgtggacgtaatctccacagtcaaagaaggatggcacctaaaccaccagtgcccaaagtctgtgtgatgaactttctcttcatactttttttcacagttggctggatgaaattttctagactttctgttggtgtatcccccccctgtatagttaggatagcatttttgatttatgcatggaaacctgaaaaaaagtttacaagtgtatatcagaaaagggaagttgtgccttttatagctattactgtctggttttaacaatttcctttatatttagtgaactacgcttgctcattttttcttacataattttttattcaagttattgtacagctgtttaagatgggcagctagttcgtagctttcccaaataaactctaaacattaatcaatcatctgtgtgaaaatgggttggtgcttctaacctgatggcacttagctatcagaagaccacaaaaattgactcaaatctccagtattcttgtcaaaaaaaaaaaaaaaaaagctcatattttgtatatatctgcttcagtggagaattatataggttgtgcaaattaacagtcctaactggtatagagcacctagtccagtgacctgctgggtaaactgtggatgatggttgcaaaagactaatttaaaaaataactaccaagaggccctgtctgtacctaacgccctatttttgcaatggctatatggcaagaaagctggtaaactatttgtctttcaggaccttttgaagtagtttgtataacttcttaaaagttgtgattccagataaccagctgtaacacagctgagagacttttaatcagacaaagtaattcctctcactaaactttacccaaaaactaaatctctaatatggcaaaaatggctagacacccattttcacattcccatctgtcaccaattggttaatctttcctgatggtacaggaaagctcagctactgatttttgtgatttagaactgtatgtcagacatccatgtttgtaaaactacacatccctaatgtgtgccatagagtttaacacaagtcctgtgaatttcttcactgttgaaaattattttaaacaaaatagaagctgtagtagccctttctgtgtgcaccttaccaactttctgtaaactcaaaacttaacatatttactaagccacaagaaatttgatttctattcaaggtggccaaattatttgtgtaatagaaaactgaaaatctaatattaaaaatatggaacttctaatatatttttatatttagttatagtttcagatatatatcatattggtattcactaatctgggaagggaagggctactgcagctttacatgcaatttattaaaatgattgtaaaatagcttgtatagtgtaaaataagaatgatttttagatgagattgttttatcatgacatgttatatattttttgtaggggtcaaagaaatgctgatggataacctatatgatttatagtttgtacatgcattcatacaggcagcgatggtctcagaaaccaaacagtttgctctaggggaagagggagatggagactggtcctgtgtgcagtgaaggttgctgaggctctgacccagtgagattacagaggaagttatcctctgcctcccattctgaccacccttctcattccaacagtgagtctgtcagcgcaggtttagtttactcaatctccccttgcactaaagtatgtaaagtatgtaaacaggagacaggaaggtggtgcttacatccttaaaggcaccatctaatagcgggttactttcacatacagccctcccccagcagttgaatgacaacagaagcttcagaagtttggcaatagtttgcatagaggtaccagcaatatgtaaatagtgcagaatctcataggttgccaataatacactaattcctttctatcctacaacaagagtttatttccaaataaaatgaggacatgtttttgttttctttgaatgctttttgaatgttatttgttattttcagtattttggagaaattatttaataaaaaaacaatcatttgctttttg

SEQ ID NO: 100 - DNA, 2038 bp, HUMAN
ggctataagcgcacggcctcggcgaccctctccgacccggccgccgccgccatgcagccctccagccttctgccgctcgccctctgcctgctggctgcacccgcctccgcgctcgtcaggatcccgctgcacaagttcacgtccatccgccggaccatgtcggaggttgggggctctgtggaggacctgattgccaaaggccccgtctcaaagtactcccaggcggtgccagccgtgaccgaggggcccattcccgaggtgctcaagaactacatggacgcccagtactacggggagattggcatcgggacgcccccccagtgcttcacagtcgtcttcgacacgggctcctccaacctgtgggtcccctccatccactgcaaactgctggacatcgcttgctggatccaccacaagtacaacagcgacaagtccagcacctacgtgaagaatggtacctcgtttgacatccactatggctcgggcagcctctccgggtacctgagccaggacactgtgtcggtgccctgccagtcagcgtcgtcagcctctgccctgggcggtgtcaaagtggagaggcaggtctttggggaggccaccaagcagccaggcatcaccttcatcgcagccaagttcgatggcatcctgggcatggcctacccccgcatctccgtcaacaacgtgctgcccgtcttcgacaacctgatgcagcagaagctggtggaccagaacatcttctccttctacctgagcagggacccagatgcgcagcctgggggtgagctgatgctgggtggcacagactccaagtattacaagggttctctgtcctacctgaatgtcacccgcaaggcctactggcaggtccacctggaccaggtggaggtggccagcgggctgaccctgtgcaaggagggctgtgaggccattgtggacacaggcacttccctcatggtgggcccggtggatgaggtgcgcgagctgcagaaggccatcggggccgtgccgctgattcagggcgagtacatgatcccctgtgagaaggtgtccaccctgcccgcgatcacactgaagctgggaggcaaaggctacaagctgtccccagaggactacacgctcaaggtgtcgcaggccgggaagaccctctgcctgagcggcttcatgggcatggacatcccgccacccagcgggccactctggatcctgggcgacgtcttcatcggccgctactacactgtgtttgaccgtgacaacaacagggtgggcttcgccgaggctgcccgcctctagttcccaaggcgtccgcgcgccagcacagaaacagaggagagtcccagagcaggaggcccctggcccagcggcccctcccacacacacccacacactcgcccgcccactgtcctgggcgccctggaagccggcggcccaagcccgacttgctgttttgttctgtggttttcccctccctgggttcagaaatgctgcctgcctgtctgtctctccatctgtttggtgggggtagagctgatccagagcacagatctgtttcgtgcattggaagaccccacccaagcttggcagccgagctcgtgtatcctggggctcccttcatctccagggagtcccctccccggccctaccagcgcccgctgggctgagcccctaccccacaccaggccgtcctcccgggccctcccttggaaacctgccctgcctgagggcccctctgcccagcttgggcccagctgggctctgccaccctacctgttcagtgtcccgggcccgttgaggatgaggccgctagaggcctgaggatgagctggaaggagtgagaggggacaaaacccaccttgttggagcctgcagggtggtgctgggactgagccagtcccaggggcatgtattggcctggaggtggggttgggattgggggctggtgccagccttcctctgcagctgacctctgttgtcctccccttgggcggctgagagccccagctgacatggaaatacagttgttggcctccggcctcccctc

SEQ ID NO: 101 - DNA, 1959 bp, HUMAN
ttggagtcaacactttcgattccaccttgggaagcccccaaggagcataagtacaaagctgaagagcacacagtcgttctcactgtcaccggggagccctgccacttccccttccagtaccaccggcagctgtaccacaaatgtacccacaagggccggccaggccctcagccctggtgtgctaccacccccaactttgatcaggaccagcgatggggatactgtttggagcccaagaaagtgaaagaccactgcagcaaacacagcccctgccagaaaggagggacctgtgtgaacatgccaagcggcccccactgtctctgtccacaacacctcactggaaaccactgccagaaagagaagtgctttgagcctcagcttctccggtttttccacaagaatgagatatggtatagaactgagcaagcagctgtggccagatgccagtgcaagggtcctgatgcccactgccagcggctggccagccaggcctgccgcaccaacccgtgcctccatgggggtcgctgcctagaggtggagggccaccgcctgtgccactgcccggtgggctacaccggacccttctgcgacgtggacaccaaggcaagctgctatgatggccgcgggctcagctaccgcggcctggccaggaccacgctctcgggtgcgccctgtcagccgtgggcctcggaggccacctaccggaacgtgactgccgagcaagcgcggaactggggactgggcggccacgccttctgccggaacccggacaacgacatccgcccgtggtgcttcgtgctgaaccgcgaccggctgagctgggagtactgcgacctggcacagtgccagaccccaacccaggcggcgcctccgaccccggtgtcccctaggcttcatgtcccactcatgcccgcgcagccggcaccgccgaagcctcagcccacgacccggaccccgtctcagtcccagaccccgggagccttgccggcgaagcgggagcagccgccttccctgaccaggaacggcccactgagctgcgggcagcggctccgcaagagtctgtcttcgatgacccgcgtcgttggcgggctggtggcgctacgcggggcgcacccctacatcgccgcgctgtactggggccacagtttctgcgccggcagcctcatcgccccctgctgggtgctgacggccgctcactgcctgcaggaccggcccgcacccgaggatctgacggtggtgctcggccaggaacgccgtaaccacagctgtgagccgtgccagacgttggccgtgcgctcctaccgcttgcacgaggccttctcgcccgtcagctaccagcacgacctggctctgttgcgccttcaggaggatgcggacggcagctgcgcgctcctgtcgccttacgttcagccggtgtgcctgccaagcggcgccgcgcgaccctccgagaccacgctctgccaggtggccggctggggccaccagttcgagggggcggaggaatatgccagcttcctgcaggaggcgcaggtaccgttcctctccctggagcgctgctcagccccggacgtgcacggatcctccatcctccccggcatgctctgcgcagggttcctcgagggcggcaccgatgcgtgccagggtgattccggaggcccgctggtgtgtgaggaccaagctgcagagcgccggctcaccctgcaaggcatcatcagctggggatcgggctgtggtgaccgcaacaagccaggcgtctacaccgatgtggcctactacctggcctggatccgggagcacaccgtttcctgattgctcagggactcatctttccctccttggtgattccgcagtgagagagtggctggggcatggaaggcaagattgtgtcccattcccccagtgcggccagctccgcgccaggatggcgcaggaactcaataaagtgctttgaaaatgctg

SEQ ID NO: 102 - DNA, 2087 bp, HUMAN
ttattaagaattgcagcaagtaagccaacaaggtcttttcaggatgattttcttatatcaagtggtacatttcattttatttacttcagtttctggtgaatgtgtgactcagttgttgaaggacacctgctttgaaggaggggacattactacggtcttcacaccaagcgccaagtactgccaggtagtctgcacttaccacccaagatgtttactcttcactttcacggcggaatcaccatctgaggatcccacccgatggtttacttgtgtcctgaaagacagtgttacagaaacactgccaagagtgaataggacagcagcgatttctgggtattctttcaagcaatgctcacaccaaataagcgcttgcaacaaagacatttatgtggacctagacatgaagggcataaactataacagctcagttgccaagagtgctcaagaatgccaagaaagatgcacggatgacgtccactgccactttttcacgtacgccacaaggcagtttcccagcctggagcatcgtaacatttgtctactgaagcacacccaaacagggacaccaaccagaataacgaagctcgataaagtggtgtctggattttcactgaaatcctgtgcactttctaatctggcttgtattagggacattttccctaatacggtgtttgcagacagcaacatcgacagtgtcatggctcccgatgcttttgtctgtggccgaatctgcactcatcatcccggttgcttgttttttaccttcttttcccaggaatggcccaaagaatctcaaagaaatctttgtctccttaaaacatctgagagtggattgcccagtacacgcattaaaaagagcaaagctctttctggtttcagtctacaaagctgcaggcacagcatcccagtgttctgccattcttcattttaccatgacactgatttcttgggagaagaactggatattgttgctgcaaaaagtcacgaggcctgccagaaactgtgcaccaatgccgtccgctgccagttttttacctataccccagcccaagcatcctgcaacgaagggaagggcaagtgttacttaaagctttcttcaaacggatctccaactaaaatacttcacgggagaggaggcatctctggatacacattaaggttgtgtaaaatggataatgagtgtaccaccaaaatcaagcccaggatcgttggaggaactgcgtctgttcgtggtgagtggccgtggcaggtgaccctgcacacaacctcacccactcagagacacctgtgtggaggctccatcattggaaaccagtggatattaacagccgctcactgtttctatggggtagagtcacctaagattttgcgtgtctacagtggcattttaaatcaatctgaaataaaagaggacacatctttctttggggttcaagaaataataatccatgatcagtataaaatggcagaaagcgggtatgatattgccttgttgaaactggaaaccacagtgaattacacagattctcaacgacccatatgcctgccttccaaaggagatagaaatgtaatatacactgattgctgggtgactggatgggggtacagaaaactaagagacaaaatacaaaatactctccagaaagccaagatacccttagtgaccaacgaagagtgccagaagagatacagaggacataaaataacccataagatgatctgtgccggctacagggaaggagggaaggacgcttgcaagggagattcgggaggccctctgtcctgcaaacacaatgaggtctggcatctggtaggcatcacgagctggggcgaaggctgtgctcaaagggagcggccaggtgtttacaccaacgtggtcgagtacgtggactggattctggagaaaactcaagcagtgtgaatgggttcccaggggccattggagtccctgaaggacccaggatttgctgggagagggtgttgagttcactgtgccagcatgcttcctccacagtaacacgctgaaggggcttggtgtttgtaagaaaatgctagaagaaaacaaactgtcacaagttgttatgtcc

SEQ ID NO: 103 - DNA, 2002 bp, HUMAN
aattccgcggcaaccgctccggcaacgccaaccgctccgctgcgcgcaggctgggctgcaggctctcggctgcagcgctgggctggtgtgcagtggtgcgaccacggctcacggcagcctcagccacccagatgtaagcgatctggttcccacctcagccttccgagtagtggatctaggatctggcttccaacatgtggcagctctgggcctccctctgctgcctgctggtgttggccaatgcccggagcaggccctctttccatcccgtgtcggatgagctggtcaactatgtcaacaaacggaataccacgtggcaggccgggcacaacttctacaacgtggacatgagctacttgaagaggctatgtggtaccttcctgggtgggcccaagccaccccagagagttatgtttaccgaggacctgaagctgcctgcaagcttcgatgcacgggaacaatggccacagtgtcccaccatcaaagagatcagagaccagggctcctgtggctcctgctgggccttcggggctgtggaagccatctctgaccgcatctgcatccacaccaatgcgcacgtcagcgtggaggtgtcggcggaggacctgctcacctgctgtggcagcatgtgtggggacggctgtaatggtggctatcctgctgaagcttggaacttctggacaagaaaaggcctggtttctggtggcctctatgaatcccatgtagggtgcagaccgtactccatccctccctgtgagcaccacgtcaacggctcccggcccccatgcacgggggagggagatacccccaagtgtagcaagatctgtgagcctggctacagcccgacctacaaacaggacaagcactacggatacaattcctacagcgtctccaatagcgagaaggacatcatggccgagatctacaaaaacggccccgtggagggagctttctctgtgtattcggacttcctgctctacaagtcaggagtgtaccaacacgtcaccggagagatgatgggtggccatgccatccgcatcctgggctggggagtggagaatggcacaccctactggctggttgccaactcctggaacactgactggggtgacaatggcttctttaaaatactcagaggacaggatcactgcggaatcgaatcagaagtggtggctggaattccacgcaccgatcagtactgggaaaagatctaatctgccgtgggcctgtcgtgccagtcctgggggcgagatcggggtagaaagtcattttattctttaagttcacgtaagatacaagtttcaggcagggtctgaaggactggattggccaaagtcctccaaggagaccaagtcctggctacatcccagcctgtggttacagtgcagacaggccatgtgagccaccgctgccagcacagagcgtccttccccctgtagactagtgccgtgggagtacctgctgcccagctgctgtggccccctccgtgatccatccatctccagggagcaagacagagacgcaggatggaaagcggagttcctaacaggatgaaagttcccccatcagttcccccagtacctccaagcaagtagctttccacatttgtcacagaaatcagaggagagatggtgttgggagccctttggagaacgccagtctccaggtccccctgcatctatcgagtttgcaatgtcacaacctctctgatcttgtgctcagcatgattctttaatagaagttttatttttcgtgcactctgctaatcatgtgggtgagccagtggaacagcgggagcctgtgctggtttgcagattgcctcctaatgacgcggctcaaaaggaaaccaagtggtcaggagttgtttctgacccactgatctctactaccacaaggaaaatagtttaggagaaaccagcttttactgtttttgaaaaattacagcttcaccctgtcaagttaacaaggaatgcctgtgccaataaaaggtttctccaacttg

SEQ ID NO: 104 - DNA, 780 bp, HUMAN
ggatataggcgcccccacacccgggcccggctaagcgccgccgccgctcctcgcctccttgctgcacgatggcctcgctccgggtggagcgcgccggcggcccgcgtctccctaggacccgagtcgggcggccggcagccgtccgcctcctccttctgctgggcgctgtcctgaatccccacgaggccctggctcagcctcttcccaccacaggcacaccagggtcagaaggggggacggtgaagaactatgagacagctgtccaattttgctggaatcattataaggatcaaatggatcctatcgaaaaggattggtgcgactgggccatgattagcaggccttatagcaccctgcgagattgcctggagcactttgcagagttgtttgacctgggcttccccaatcccttggcagagaggatcatctttgagactcaccagatccactttgccaactgctccctggtgcagcccaccttctctgaccccccagaggatgtactcctggccatgatcatagcccccatctgcctcatccccttcctcatcactcttgtagtatggaggagtaaagacagtgaggcccaggcctagggggcacgagcttctcaacaaccatgttactccacttccccacccccaccaggcctccctcctcccctcctactcccttttctcactctcatccccaccacagatccctggattgctgggaatggaagccagggttgggcatggcacaagttctgtaatcttcaaaataaaactttttttttga

SEQ ID NO: 105 - DNA, 1312 bp, HUMAN
gagcgtgacccagctgcggccggccagccatggagactggagcgctgcggcgcccgcaacttctcccgttgctgctgctgctctgcggtgggtgtcccagagcaggcggctgcaacgagacaggcatgttggagaggctgcccctgtgtgggaaggctttcgcagacatgatgggcaaggtggacgtctggaagtggtgcaacctgtccgagttcatcgtgtactatgagagtttcaccaactgcaccgagatggaggccaatgtcgtgggctgctactggcccaaccccctggcccagggcttcatcaccggcatccacaggcagttcttctccaactgcaccgtggacagggtccacttggaggaccccccagacgaggttctcatcccgctgatcgttatacccgtcgttctgactgtcgccatggctggcctggtggtgtggcgcagcaaacgcaccgacacgctgctgtgagggtcccggtgagatggagtgggtcacacctggcaagctggaagaaagttccctggggatgggagatcgggtgggtgctgccaatctccagctactgtggccacaccccacctggtcatgggcagacccctcccttcctgggctgacctgctccctcgaggccagcctgctccctggctgaggctcaggctatccgcccaagctctttgctcattctagggccagtggaggaaaatgtgataaggccagagcttgtgtgctgggcaagaaatcacctgctgcatcctgtgctccgcaggctgggccggaagcctctgcctgcaggtttctatgctgtttcttagcacagaatccagcctagccttagccgcagtctaggccctgcttggactaggactccttgcttgaccccatctctggttcctgccctggctcctgcaccagccccagctcctgcctacatccaggcagaaatataggcaggggctcttggaagacgttccgtgctgtgacctccgagccctcctggtgggaagacagctggaaaggctgggaggagaagggaggggctgggggttcccaggagccatgcgtggcctgcagagtccattccatcatgatgctgtgcccgctatgggctgtgtccatgaccagaggctggagtgggggtgtgttatagcccctcaccgggacttgctgtgcggatggggcctgggcctccttcctacaggggctcctctgtgggtgaggggccctctggaatggcatcccatgagcttgtggcctctatctgctaccatctgtgttttatctgagtaaagttaccttacttctgg

SEQ ID NO: 106 - DNA, 1938 bp, HUMAN
attccggttgttgcaccatggcgtccatggggaccctcgccttcgatgaatatgggcgccctttcctcatcatcaaggatcaggaccgcaagtcccgtcttatgggacttgaggccctcaagtctcatataatggcagcaaaggctgtagcaaatacaatgagaacatcacttggaccaaatgggcttgataagatgatggtggataaggatggagatgtgactgtaactaatgatggggccaccatcttaagcatgatggatgttgatcatcagattgccaagctgatggtggaactgtccaagtctcaggatgatgaaattggagatggaaccacaggagtggttgtcctggctggtgccttgttagaagaagcggagcaattgctagaccgaggcattcacccaatcagaatagccgatggctatgagcaggctgctcgtgttgctattgaacacctggacaagatcagcgatagcgtccttgttgacataaaggacaccgaacccctgattcagacagcaaaaaccacgctgggctccaaagtggtcaacagttgtcaccgacagatggctgagattgctgtgaatgccgtcctcactgtagcagatatggagcggagagacgttgactttgagcttatcaaagtagaaggcaaagtgggcggcaggctggaggacactaaactgattaagggcgtgattgtggacaaggatttcagtcacccacagatgccaaaaaaagtggaagatgcgaagattgcaattctcacatgtccatttgaaccacccaaaccaaaaacaaagcataagctggatgtgacctctgtcgaagattataaagcccttcagaaatacgaaaaggagaaatttgaagagatgattcaacaaattaaagagactggtgctaacctagcaatttgtcagtggggctttgatgatgaagcaaatcacttacttcttcagaacaacttgcctgcggttcgctgggtaggaggacctgaaattgagctgattgccatcgcaacaggagggcggatcgtccccaggttctcagagctcacagccgagaagctgggctttgctggtcttgtacaggagatctcatttgggacaactaaggataaaatgctggtcatcgagcagtgtaagaactccagagctgtaaccatttttattagaggaggaaataagatgatcattgaggaggcgaaacgatcccttcacgatgctttgtgtgtcatccggaacctcatccgcgataatcgtgtggtgtatggaggaggggctgctgagatatcctgtgccctggcagttagccaagaggcggataagtgccccaccttagaacagtatgccatgagagcgtttgccgacgcactggaggtcatccccatggccctctctgaaaacagtggcatgaatcccatccagactatgaccgaagtccgagccagacaggtgaaggagatgaaccctgctcttggcatcgactgtttgcacaaggggacaaatgatatgaagcaacagcatgtcatagaaaccttgattggcaaaaagcaacagatatctcttgcaacacaaatggttagaatgattttgaagattgatgacattcgtaagcctggagaatctgaagaatgaagacattgagaaaactatgtagcaagatccacttctgtgattaagtaaatggatgtctcgtgatgcatctacagttatttattgttacatccttttccagacactgtagatgctataataaaaatagctgtttggtaaccatagtttcacttgttcaaagctgtgtaatcgtgggggtaccatctcaactgcttttgtattcattgtattaaaagaatctgtttaaacaacctttatcttctcttcgggtttaagaaacgtttattgtaacagtaattaaatgctgccttaattg

SEQ ID NO: 107 - DNA, 3002 bp, HUMAN
gccattctctcacatcccgtgcggtcaggaagcccttcctgaactctgacttcagttcttgctgcggtttctgcccatttttttcatatcctctgacagctgcgaggtcatctctgctctggcttttctccaagcagaacaagtgggggctctggaaaggttaagggacctcagtggccaccattatactttgcatctttcctgagaagtgagagttgaaagggaagcaggaaggcccatggtcagattgaaggaaggactttttagtttcttttttttttttttgaaatggagtctcgctctgtcattcaggctggagtgcagtggtgcgatctcagctcactgcagcctccacttcctgggttcacatgattctcctgcctcagcctcccaagtagctgagactacaggcacatgccactacacccagctaacttttgtatttttagtagagacggggtttcaccatgttggccaggctggtctcaaactgctaacatcaagtgatctgctcccctcagcctcccaaagtgctgggattaccggtatgaaccaccacaacctgccaggaatttttagtttttagcttttgcaggagacttcaaggaaaggagacattcctctgtccaggaaacgggtaaggggaccatttctgcattgctggtttcccctcttggcagggtgggcatgaggcatcactgttcctgctccctcactcctgctcctcatgctcagcctgccagctcggcctcaactttgtgtgtctaaagtggaactgaatagtagctgtgagaagataggaaagaggtagtgccaatctccttgcccagatcataaatccagactcagcagggtaaccacatgggcaagcacaaggtaggtgcttggggaaaggggaagtaattggcattctgtgtgataccaaggagaccatttggattttggcttctaccaaagagaatggagaattggttgacctaaatggaaccagtccctttaagtaaggggaggaaagggggtgctggaagatggccctcttcccaccacctagatcatagcttgaactgaagccaaggacagagtgctgcccccttcggcatttactgatgtgccctctttaaatcatgatgttatctaacccaaacccagacccaggacctagtcacagctccaacctacacttcctattaatcttaaaacaaagcgaaacaaacacaaaaagatatcagcattgtagcctccaatctgagcccatttcccttctctggctaccatacctccttctcctatatgataccattcactactttgttcaattatccagtctagacctgcatcttgaggccacacccagccttctcactccccacacccctctttcctctctcactgctccttcctggtctcttctcatctggccccacctctaaggagtcctcctgccttctgggttgccctggaaaacagactatcccccctcctagtgaagggagtgggtaggggtttcagccccaccctcaggaagatgcgtcttccctgtcctctgctctgtggtacttcctctctggctgatttagcaaacagcacctagacctggggccaggcctttggcagtgggacagatccagggataggctacaccaccctgccctgaccctgggattggcatcagcttccaaccagttcctgccaaagcttgtaagtcctcccgacggccatgaacactacatcttctgcagcacccccctcactaggtgtagagttcatctctctgctggctatcatcctgctgtcagtggcgctggctgtggggcttcccggcaacagctttgtggtgtggagtatcctgaaaaggatgcagaagcgctctgtcactgccctgatggtgctgaacctggccctggccgacctggccgtattgctcactgctccctttttccttcacttcctggcccaaggcacctggagttttggactggctggttgccgcctgtgtcactatgtctgcggagtcagcatgtacgccagcgtcctgcttatcacggccatgagtctagaccgctcactggcggtggcccgcccctttgtgtcccagaagctacgcaccaaggcgatggcccggcgggtgctggcaggcatctgggtgttgtcctttctgctggccacacccgtcctcgcgtaccgcacagtagtgccctggaaaacgaacatgagcctgtgcttcccgcggtaccccagcgaagggcaccgggccttccatctaatcttcgaggctgtcacgggcttcctgctgcccttcctggctgtggtggccagctactcggacatagggcgtcggctacaggcccggcgcttccgccgcagccgccgcaccggccgcctggtggtgctcatcatcctgaccttcgccgccttctggctgccctaccacgtggtgaacctggctgaggcgggccgcgcgctggccggccaggccgccgggttagggctcgtggggaagcggctgagcctggcccgcaacgtgctcatcgcactcgccttcctgagcagcagcgtgaaccccgtgctgtacgcgtgcgccggcggcggcctgctgcgctcggcgggcgtgggcttcgtcgccaagctgctggagggcacgggttccgaggcgtccagcacgcgccgcgggggcagcctgggccagaccgctaggagcggccccgccgctctggagcccggcccttccgagagcctcactgcctccagccctctcaagttaaacgaactgaactaggcctggtggaaggaggcgcactttcctcctggcagaatgctagctctgagccagttcagtacctggaggaggagcaggggcgtggagggcgtggagggcgtgggagcgtgggaggcgggagtggagtggaagaagagggagagatggagcaaagtgagggccgagtgagagcgtgctccagcctggctcccacaggcagctttaaccattaaaactgaagtctgaa

SEQ ID NO: 108 - DNA, 1854 bp, HUMAN
ggcccaggctgaagctcagggccctgtctgctctgtggactcaacagtttgtggcaagacaagctcagaactgagaagctgtcaccacagttctggaggctgggaagttcaagatcaaagtgccagcagattcagtgtcatgtgaggacgtgcttcctgcttcatagataagagtagcttggagctcggcggcacaaccagcaccatctggtcgcgatggtggacacggaaagcccactctgccccctctccccactcgaggccggcgatctagagagcccgttatctgaagagttcctgcaagaaatgggaaacatccaagagatttcgcaatccatcggcgaggatagttctggaagctttggctttacggaataccagtatttaggaagctgtcctggctcagatggctcggtcatcacggacacgctttcaccagcttcgagcccctcctcggtgacttatcctgtggtccccggcagcgtggacgagtctcccagtggagcattgaacatcgaatgtagaatctgcggggacaaggcctcaggctatcattacggagtccacgcgtgtgaaggctgcaagggcttctttcggcgaacgattcgactcaagctggtgtatgacaagtgcgaccgcagctgcaagatccagaaaaagaacagaaacaaatgccagtattgtcgatttcacaagtgcctttctgtcgggatgtcacacaacgcgattcgttttggacgaatgccaagatctgagaaagcaaaactgaaagcagaaattcttacctgtgaacatgacatagaagattctgaaactgcagatctcaaatctctggccaagagaatctacgaggcctacttgaagaacttcaacatgaacaaggtcaaagcccgggtcatcctctcaggaaaggccagtaacaatccaccttttgtcatacatgatatggagacactgtgtatggctgagaagacgctggtggccaagctggtggccaatggcatccagaacaaggaggtggaggtccgcatctttcactgctgccagtgcacgtcagtggagaccgtcacggagctcacggaattcgccaaggccatcccagcgttcgcaaacttggacctgaacgatcaagtgacattgctaaaatacggagtttatgaggccatattcgccatgctgtcttctgtgatgaacaaagacgggatgctggtagcgtatggaaatgggtttataactcgtgaattcctaaaaagcctaaggaaaccgttctgtgatatcatggaacccaagtttgattttgccatgaagttcaatgcactggaactggatgacagtgatatctccctttttgtggctgctatcatttgctgtggagatcgtcctggccttctaaacgtaggacacattgaaaaaatgcaggagggtattgtacatgtgctcagactccacctgcagagcaaccacccggacgatatctttctcttcccaaaacttcttcaaaaaatggcagacctccggcagctggtgacggagcatgcgcagctggtgcagatcatcaagaagacggagtcggatgctgcgctgcacccgctactgcaggagatctacagggacatgtactgagttccttcagatcagccacaccttttccaggagttctgaagctgacagcactacaaaggagacgggggagcagcacgattttgcacaaatatccaccactttaaccttagagcttggacagtctgagctgtaggtaaccggcatattattccatatctttgttttaaccagtacttctaagagcatagaactcaaatgctgggggaggtggctaatctcaggactgggaag

SEQ ID NO: 109 - DNA, 1643 bp, HUMAN
ggaattccctgatatacacctggaccaccaccaatggatatacaaatggcaaacaattttactccgccctctgcaactcctcagggaaatgactgtgacctctatgcacatcacagcacggccaggatagtaatgcctctgcattacagcctcgtcttcatcattgggctcgtgggaaacttactagccttggtcgtcattgttcaaaacaggaaaaaaatcaactctaccaccctctattcaacaaatttggtgatttctgatatactttttaccacggctttgcctacacgaatagcctactatgcaatgggctttgactggagaatcggagatgccttgtgtaggataactgcgctagtgttttacatcaacacatatgcaggtgtgaactttatgacctgcctgagtattgaccgcttcattgctgtggtgcaccctctacgctacaacaagataaaaaggattgaacatgcaaaaggcgtgtgcatatttgtctggattctagtatttgctcagacactcccactcctcatcaaccctatgtcaaagcaggaggctgaaaggattacatgcatggagtatccaaactttgaagaaactaaatctcttccctggattctgcttggggcatgtttcataggatatgtacttccacttataatcattctcatctgctattctcagatctgctgcaaactcttcagaactgccaaacaaaacccactcactgagaaatctggtgtaaacaaaaaggctctcaacacaattattcttattattgttgtgtttgttctctgtttcacaccttaccatgttgcaattattcaacatatgattaagaagcttcgtttctctaatttcctggaatgtagccaaagacattcgttccagatttctctgcactttacagtatgcctgatgaacttcaattgctgcatggacccttttatctacttctttgcatgtaaagggtataagagaaaggttatgaggatgctgaaacggcaagtcagtgtatcgatttctagtgctgtgaagtcagcccctgaagaaaattcacgtgaaatgacagaaacgcagatgatgatacattccaagtcttcaaatggaaagtgaaatggattgtattttggtttatagtgacgtaaactgtatgacaaactttgcaggacttcccttataaagcaaaataattgttcagcttccaattagtattcttttatatttctttcattgggcgctttcccatctccaactcggaagtaagcccaagagaacaacataaagcaaacaacataaagcacaataaaaatgcaaataaatattttcatttttatttgtaaacgaatacaccaaaaggaggcgctcttaataactcccaatgtaaaaagttttgttttaataaaaaattaattattattcttgccaacaaatggctagaaaggactgaatagattatatattgccagatgttaatactgtaacatactttttaaataacatatttcttaaatccaaatttctctcaatgttagatttaattccctcaataacaccaatgttttgttttgtttcgttctgggtcataaaactttgttaaggaactcttttggaataaagagcaggatgctgcggaattc

SEQ ID NO: 110 - DNA, 1812 bp, HUMAN
  misc_feature (1)..(1812): N=any base
cgtcgctgccggtctcccggagaganctctggagtttgggcggcccgggcggccactaggtactctgatattccgtactaaacacgtctgcaagtcaagatgtcgcacccgtccccccaagccaagccctccaaccccagtaaccctcgagtcttctttgacgtggacatcggaggggagcgagttggtcgaattgtcttagaattgtttgcagatatcgtacccaaaactgcggaaaattttcgtgcactgtgtacaggagaaaaaggcattggacacacgactgggaaacctctccatttcaaaggatgcccttttcatcgaattattaagaaatttatgattcagggtggagacttctcaaatcagaatgggacaggtggagaaagtatttatggtgaaaaatttgaagatgaaaatttccattacaagcatgatcgggagggtttactgagcatggcaaatgcaggccgcaacacaaacggttctcagttttttatcacaacagttccaactcctcatttggatgggaaacatgtggtgtttggccaagtaattaaaggaataggagtggcaaggatattggaaaatgtggaagtgaaaggtgaaaaacctgctaaattgtgcgttattgcagaatgtggagaattgaaggaaggagatgacgggggaatattcccaaaagatggctctggcgacagtcatccagatttccctgaggatgcggatatagatttaaaagatgtagataaaattttattaataacagaagacttaaaaaacattggaaatacttttttcaaatcccagaactgggagatggctattaaaaaatatgcagaagttttaagatacgtggacagttcaaaggctgttattgagacagcagatagagccaagctgcaacctatagctttaagctgtgtactgaatattggtgcttgtaaactgaagatgtcaaattggcagggagcaattgacagttgtttagaggctcttgaactagacccatcaaataccaaagcattgtaccgcagagctcaaggatggcaaggattaaaagaatatgatcaagcattggctgatcttaagaaagctcaggggatagcaccagaagataaagctatccaggcagaattgctgaaagtcaaacaaaagataaaggcacagaaagataaagagaaggcagtatatgcaaaaatgtttgcttagaaaggattcagttttgcttattgtgtgttgattgtataaatgcaataagaaaatgtaaaggtttttgtctatgaatatgatccctaatgtgtttcttttgacaccttagttccttactgtttacagtttaggagtactgataggggttcatgcttaataaacatgtcacaatacagtaagtaaagtggttttgtttgtttctttgagatggagtcttgctctgtcacccaggctggagtgcggtggcgcaatctcggctcactgcatcctctgcctcccgggttcaagcaattctcctgcctcagcttcccaagtagctgggattacaggcacgtgccaccacgcccagactaatttttgtatttttagtagagatggggtttcaccatattggtcacgtcacgttggtcttgaactcctgaccttgtgatccaccccgccttggcctcccaaagtgctgggattacaggtgtgagccaccgtgcccggccaagtaaaatgttttttaaaatggttatgtgcattattcataaaaaataatggtgtccagtctttttaaacttgtaaagacacatcttattgaataaagagatgagagcg

SEQ ID NO: 111 - DNA, 1792 bp, HUMAN
cagcgcgatgtgggttcccggcttcggatccgcgcgacttccccagcgccggcgctccgggttggagtcatcctcggtgcggccgctgtggctgctgctgctgttcctgctggcagccgtgcggccagtgcgcgcctgggagagcggagacctggagttgttcgacttggtggaagaggtgcagttgaacttctacgagttcctcggggtgcagcaggatgcttcatctgcagacatcagaaaagcatatcgtaagctttcactaaccttacatccagacaagaataaagatgaaaatgcagaaactcaatttagacaattggtggccatttatgaagttttaaaggatgatgaaagaaggcagaggtatgatgatgttctgatcaatggacttccagattggcgacagcctgtattctactacaggcgagtgagaaaaatgagcaatgctgagctggctttgctcttgttcattattctcacagtgggtcactatgctgtggtttggtccatctacctggaaaagcaactggatgaactgcttggtagaaaaaagagagaaaggaagaagaagacaggaagcaagagtgtggacgcagcaaaacttggtgcttctgaaaagaacgaaagattgcttataaaaccacaatggcatgatttgcttccatgcaaactggggatttggttttgccttacactaaaagcattgcctcatctaatccaggatgctgggcagttttatgcaaaatataaggagacaaaattgaaggaaaaagaagacgcactggctagaattgaaattgaaacccttcaaaaacagaagaaagttaaagttaaaaaaccaaaaccagaatttcctgtgtatatgcctttagaaaatacgtatattcagtcttatgatcatggaacttctattgaagaaattgaggagcaaatggatgactggctggaaaacaggaaaagaacacagaaaagacaggcacctgaatggacagaagaggacctcagtcaactgacaagaagtatggttaagttcccaggagggactccaggtcgatgggacaagattgcccatgaattgggtcgatctgtgacagatgtgacaaccaaagccaaggaactgaaggactcagtcaccagctcccccggaatgaccaggctctctgaacttaagtcaaatggtcagaattccaggccaatcaagatagccacagccttgccagatgacatcatcacgcagcgggaggactcagcaggggccatggaggatgaggagcacgaggctgctgagggtgagcaggagtcagcgaccacagaagcccgacctcggaggcggaagtcagccagggcggccgaggctgtaaccagagtggagccagaggagaagctgagaggaaagaggcaaaaagactttgatatatcagaacaaaacgattccagtgacgaagagaaacaacgaaaagaaagaactcgtgctgcagaggaggcgtggactcagagtcagcagaaacttctggaattggcattacagcaataccctaaaggagcttctgaccgctgggacaaaatagccaaatgtgtcccgtctaagagtaaggaagactgcattgctagatacaagctgctggttgaactggtccaaaagaaaaagcaggctaaaagctgaatcttctggaaggtgacgatcaatgaccatcattttccaaacaagtactcgagaaatctcatgcagaaacttatattttgtacctcagtatttctaaacatcatgtgccttagtaaaaaaaaaaaa

SEQ ID NO: 112 - DNA, 3457 bp, HUMAN
cctccacctcccgggttcaagcgattctcctgcctcagcctcccgagtagctgagactacaggcacgcgccaccacgcccagctaatttttgtatctttagtagagacgggctttcaccatgttggccaggatggtctcgatgtcttaacgtcgtgatccggccgcctcggcctcccaagtgctgggattacaggcgttagccactgcgcccggccccagccaggcagttttaatcgagcgctcacaaccactgagacgcagcgaagcacccaccataatatcccaggaggccgaccgccggttcagactttttcttttctttaatccccgtccaagggatccgccctcaccccccaccccagccaccccaattccctattccctccccttggacggcgccggggaaaacaagctgctcgagctttatttcttcggtgcaaccaactcagaatgaattcctccgcccctgcgtgctcagtgagtcggcaccctagcagtgaactgcatttaaaacctcaggaattgagcgaactctcccagtggctctcctcaccgggatccccttccacgcctcctccccgtgccgcgcctcagtccgcactgctcattggccgcgtgcctgccaatccgatgcacgtcggctagggcaaagaccgcgaaaaagcgcgtacacctggctctgggagcgcgcgcctaacgccagccagcagcaggaggcgcgcgaggcaccacggcctggcggccgagagtcagggaggaacctcatttacataacggccgcccctctgtctcctggcgggggccggagtcccgcccctcgtccaacttgaaatctgttgggtcacgggccagtcactccgacctaggcaagcctgtggtggagctggaagagtttgtgagggcggtcccgggagcggattgggtctgggagttcccagaggcggctataagaaccgggaactgggcgcggggagctgagttgctggtagtgcccgtggtgcttggttcgaggtggccgttagttgactccgcggagttcatctccctggttttcccgtcctaacgtcgctcgcctttcagtcaggatgtctgcccgtggcccggctatcggcatcgacctgggcaccacctattcgtgcgtcggggtcttccaacatggcaaggtggagatcatcgccaacgaccagggcaatcgcaccacccccagctacgtggccttcacggacaccgagcgcctcatcggcgacgccgccaagaaccaggtggccatgaaccccaccaacaccatcttcgacgccaagaggctgattggacggaaattcgaggatgccacagtgcagtcggatatgaaacactggccgttccgggtggtgagcgagggaggcaagcccaaagtgcaagtagagtacaagggggagaccaagaccttcttcccagaggagatatcctccatggtcctcacgaagatgaaggagatcgcggaagcctacctggggggcaaggtgcacagcgcggtcataacggtcccggcctatttcaacgactcgcagcgccaggccaccaaggacgcaggcaccatcacggggctcaatgtgctgcgcatcatcaacgagcccacggcggcggccatcgcctacggcctggacaagaagggctgcgcgggcggcgagaagaacgtgctcatctttgacctgggcggtggcactttcgacgtgtccatcctgaccatcgaggatggcatcttcgaggtgaagtccacggccggcgatacccacctgggcggtgaggacttcgacaaccgcatggtgagccacctggcggaggagttcaagcgcaagcacaagaaggacattgggcccaacaagcgcgccgtgaggcggctgcgcaccgcttgcgagcgcgccaagcgcaccctgagctcgtccacgcaggcgagcatcgagatcgactcgctctacgagggcgtggacttctatacgtccatcacgcgcgcccgcttcgaggagctcaatgccgacctctttcgcgggaccctggagccggtggagaaggcgctgcgcgacgccaagctggacaagggccagatccaggagatcgtgctggtgggcggctccactcgtatccccaagatccagaagctgctgcaggatttcttcaacggcaaggagctgaacaagagcatcaaccccgacgaggcggtggcctatggcgccgcggtgcaggcggccatcctcatcggcgacaaatcagagaatgtgcaggacctgctgctactcgacgtgaccccgttgtcgctgggcatcgagacagctggcggtgtcatgaccccactcatcaagaggaacaccacgatccccaccaagcagacgcagaccttcaccacctactcggacaaccagagcagcgtactggtgcaggtatacgagggcgaacgggccatgaccaaggacaataacctgctgggcaagttcgacctgaccgggattccccctgcgcctcgcggggtcccccaaatcgaggttaccttcgacattgacgccaatggcatccttaacgttaccgccgccgacaagagcaccggtaaggaaaacaaaatcaccatcaccaatgacaaaggtcgtctgagcaaggacgacattgaccggatggtgcaggaggcggagcggtacaaatcggaagatgaggcgaatcgcgaccgagtcgcggccaaaaacgccctggagtcctatacctacaacatcaagcagacggtggaagacgagaaactgaggggcaagattagcgagcaggacaaaaacaagatcctcgacaagtgtcaggaggtgatcaactggctcgaccgaaaccagatggcagagaaagatgagtatgaacacaagcagaaagagctcgaaagagtttgcaaccccatcatcagcaaactttaccaaggtggtcctggcggcggcagcggcggcggcggttcaggagcctccgggggacccaccatcgaagaagtggactaagcttgcactcaagtcagcgtaaacctctttgcctttctctctctctcttttttttttgtttgtttctttgaaatgtccttgtgccaagtacgagatctattgttggaagtctttggtatatgcaaatgaaaggagaggtgcaacaacttagtttaattataaaagttccaaagtttgttttttaaaaacattattcgaggtttctctttaatgcattttgcgtgtttgctgacttgagcatttttgattagttcgtgcatggagatttgtttgagatgagaaaccttaagtttgcacacctgttctgtagaagcttggaaacagtaaaatatataggagcttaaattgtttatttttatgtactactttaaaactaaactgaacattgcagtaatgttaaggacaggtatactttttgcaaacaaatgcataaatgcaaatgtaaagtaaa

SEQ ID NO: 113 - DNA, 1365 bp, HUMAN
ataattccatccctcctccaacttttccctctcaagctctgcccttcccagcccagcccagcctacccaacctcatctcttccctgtagaccacatcccaccatgttcccctgagcctccaaggaaggggctcaggggccccatggcctcccgctccctgtggccccacagcccccgtgggccaggggaagcgccccagaagccgaagtgcccaccatgggcaaccacacgtgggagggctgccacgtggactcgcgcgtggaccacctctttccgccatccctctacatctttgtcatcggcgtggggctgcccaccaactgcctggctctgtgggcggcctaccgccaggtgcaacagcgcaacgagctgggcgtctacctgatgaacctcagcatcgccgacctgctgtacatctgcacgctgccgctgtgggtggactacttcctgcaccacgacaactggatccacggccccgggtcctgcaagctctttgggttcatcttctacaccaatatctacatcagcatcgccttcctgtgctgcatctcggtggaccgctacctggctgtggcccacccactccgcttcgcccgcctgcgccgcgtcaagaccgccgtggccgtgagctccgtggtctgggccacggagctgggcgccaactcggcgcccctgttccatgacgagctcttccgagaccgctacaaccacaccttctgctttgagaagttccccatggaaggctgggtggcctggatgaacctctatcgggtgttcgtgggcttcctcttcccgtgggcgctcatgctgctgtcgtaccggggcatcctgcgggccgtgcggggcagcgtgtccaccgagcgccaggagaaggccaagatcaagcggctggccctcagcctcatcgccatcgtgctggtctgctttgcgccctatcacgtgctcttgctgtcccgcagcgccatctacctgggccgcccctgggactgcggcttcgaggagcgcgtcttttctgcataccacagctcactggctttcaccagcctcaactgtgtggcggaccccatcctctactgcctggtcaacgagggcgcccgcagcgatgtggccaaggccctgcacaacctgctccgctttctggccagcgacaagccccaggagatggccaatgcctcgctcaccctggagaccccactcacctccaagaggaacagcacagccaaagccatgactggcagctgggcggccactccgcctcccagggggaccaggtgcagctgaagatgctgccgccagcacaatgaaccccgagtggcacagaatccccagttttcccctctcatcccacagtcccttctctcctgg

SEQ ID NO: 114 - DNA, 444 bp, HUMAN
tttttcatgctcattgctgtttattgaaacaaaagaatcagaagaagatcagaatgaagacaataataaaaagcagaagcagaagtacaagaagaataaagaaagaaagggaaagaattgtaggaaggaaaaacttgtagaagtagagggtggagagtgcgaagaggtggagtatgatgggcagtccgatcttttccatctgggctttcagacaatgggatatgtcatggaaggcttctttaaacaccagaagaaattcaggataaagctcaaaaagagcaggcaatcgataggggttgaaaatccactcagtaggccacggaaggacttcaagaaggttgatcgttctgtcgctggatgttgtaggtgtcctacgtgaaggcaatcgacatctggatggctgtgtgtcggctctttgtgttcgctgccttgctggagtatgcc

SEQ ID NO: 115 - DNA, 383 bp, HUMAN
ggtgcgcatgcgcatcacctgggcggcacccgcggtactgcgcctgcgcggtctcgccgcttcccaggtccgctccgcagggcgagcgcgcgccagtcccactcgtgcgccgctcttcatgtccccgcggtcgaagacggtcacatacgcccccaagaaaacgtcgccgaggatccacacaggtactggaggcgaacgatgtccaaggcccggaagccggacaagcagaggcggacgtcaccctgagcaaactggatgacgtaatcctgggccgtgagattaaaccagacccccccaatgaggagtgagactgcggggagctttgggatttctgagcaccggatgatgtactccccagccagcaagggggattcccccaatgg

SEQ ID NO: 116 - DNA, 343 bp, HUMAN
gcggttctggccatgaagcccacctcaggcccagaggaggcccggcggcagcctcggacatccgcgtgttcgccagcaactgctcgatgcacgggctgggcacgtcttcgggccaggcagcctgagcctgcgccgggggatgtgggcagcggcgtggtcctgtcagtggccaccttcctctaccaggtggctgagagggtgcgctactacagggagttccaccaccagactgccctggatgagcgagaaagccaccggtcagtcttcccggctgtcaccctgtgcaacatcaacccactgcgccgctcgcgcctaacgcccaacgacctgcactgggctgggt

SEQ ID NO: 117 - DNA, 308 bp, HUMAN
  misc_feature (1)..(308): N=any base
gggcaagtccagtgcagacgtgcgggctctgacctactgcgacntgcanaagatccagcgggcagatctgctggaggtgctggacatgtacccggcctttgcggagagcttctggagtaagctggaggtcaccttcaacctgcgggacncacgggggtctccactcatccccccgacagctcctggcagccaagaccaccaaggtttctttctcagtgacaacagtcagatgcagcccctnccctggagcatctcagatgcatctggcctctgctggagncttactgnagggaaatgcccccaaggca

SEQ ID NO: 118 - DNA, 366 bp, HUMAN
atgaaggtctccgtggctgccctctcctgcctacatgcctttttactgcccttggtcccagggccgggtcacaaaagatgcagagacagagttcatgaatgtcaaagcttcattggaaagatccagtacttctgggacagattccatgctactagtgctgactgctgcatctcctacaccccacgaagcatcccgtgttcactcctggagagttactttgaaacgaacagcgagtgctccaagccgggtgtcatcttcctcaccaagaaggggcgacgtttctgtgccaaccccagtgataagcaagttcaggtttgcatgagaatgctgaagctggacacacggatcaagaccaggaagaattga

SEQ ID NO: 119 - DNA, 2313 bp, HUMAN
ccgagccgcagtttccgtgttgtgagtgagtccgggcccgtgtcccctctcccgccgccgccatgggctgcacgttgagcgccgaagacaaggcggcagtggagcgaagcaagatgatcgaccgcaacttacgggaggacggggaaaaagcggccaaagaagtgaagctgctgctactcggtgctggagaatctggtaaaagcaccattgtgaaacagatgaaaatcattcatgaggatggctattcagaggatgaatgtaaacaatataaagtagttgtctacagcaatactatacagtccatcattgcaatcataagagccatgggacggctaaagattgactttggggaagctgccagggcagatgatgcccggcaattatttgttttagctggcagtgctgaagaaggagtcatgactccagaactagcaggagtgattaaacggttatggcgagatggtggggtacaagcttgcttcagcagatccagggaatatcagctcaatgattctgcttcatattatctaaatgatctggatagaatatcccagtctaactacattccaactcagcaagatgttcttcggacgagagtgaagaccacaggcattgtagaaacacatttcaccttcaaagacctatacttcaagatgtttgatgtaggtggccaaagatcagaacgaaaaaagtggattcactgttttgagggagtgacagcaattatcttctgtgtggccctcagtgattatgaccttgttctggctgaggacgaggagatgaaccgaatgcatgaaagcatgaaactgtttgacagcatttgtaataacaaatggtttacagaaacttcaatcattctcttccttaacaagaaagacctttttgaggaaaaaataaagaggagtccgttaactatctgttatccagaatacacaggttccaatacatatgaagaggcagctgcctatattcaatgccagtttgaagatctgaacagaagaaaagataccaaggagatctatactcacttcacctgtgccacagacacgaagaatgtgcagtttgtttttgatgctgttacagatgtcatcattaaaaacaacttaaaggaatgtggactttattgagaagcatggatgttagtgaaagttactacagtgtggagtgttgagaccagacaccttttgctgtctcatggggcagctacaagcatgaacgggaccagggaatggcagcagcatgcagaatcttagcactctttagcacaatattttgtattagggaacttttaattgacatgagatgctaaagtcagacattggaattggaagaactataaagtgtgattcgatcgtcaagacatcacttggatttcttaatcttaaatgcttatggaagatgtgaagttgaggtgctgcattctagaacttcaatatgtagcttactctttttttccccccttcttaaaccaccagtggttcatttttaaggttttttcatcaagagaagaataactttactaaattttatttctttatttgcaaaagaatctttattaaaacaaacaatcttaactatgcacatgatgtgaccagatcatcttgaaaatattcctctttagtaggaactctttgtttttaactcttggtatggtcagaatataatacttccataattacttataattctttccggttactggggctataaatacaactttttaaatgaaatttatgttattatcctgctcaaagtaccattatggtttccatatggtaattacattggaaagttctgcaataagattctagttctctcttttctttaagcttatggttgaaggttaaccttgtttgtgcagattaccaaattactgctgatgtagtatgataaagtcagcttcttggatacagacacacccagggcagctgccaatcagaaatgcaaattgctaaattccaaacagaaccagtgactttgctgctacatatttactaaattgaccactttgattcttgcttgtttgtctcagttatagggagttttgtacatggtgcctcttgttttccatcttcatggccttttctgttgagaaacatctaaagtgtattaacagtgcatgcttttactttgtaaatgtggtgccaaatccctgtttgccatcgtttttactgtaccgatgttaactgtagtaatccttagccagtatgttcttttgctgaaactgttgcattttgggacttttttccactttgtcatgtgtacatttttaatctgttatagttggcggcagtattaaaatggtgagtaaag

SEQ ID NO: 120 - DNA, 4604 bp, HUMAN
ggaacagcttgtccacccgccggccggaccagaagcctttgggtctgaagtgtctgtgagacctcacagaagagcacccctgggctccacttacctgccccctgctccttcagggatggaggcaatggcggccagcacttccctgcctgaccctggagactttgaccggaacgtgccccggatctgtggggtgtgtggagaccgagccactggctttcacttcaatgctatgacctgtgaaggctgcaaaggcttcttcaggcgaagcatgaagcggaaggcactattcacctgccccttcaacggggactgccgcatcaccaaggacaaccgacgccactgccaggcctgccggctcaaacgctgtgtggacatcggcatgatgaaggagttcattctgacagatgaggaagtgcagaggaagcgggagatgatcctgaagcggaaggaggaggaggccttgaaggacagtctgcggcccaagctgtctgaggagcagcagcgcatcattgccatactgctggacgcccaccataagacctacgaccccacctactccgacttctgccagttccggcctccagttcgtgtgaatgatggtggagggagccatccttccaggcccaactccagacacactcccagcttctctggggactcctcctcctcctgctcagatcactgtatcacctcttcagacatgatggactcgtccagcttctccaatctggatctgagtgaagaagattcagatgacccttctgtgaccctagagctgtcccagctctccatgctgccccacctggctgacctggtcagttacagcatccaaaaggtcattggctttgctaagatgataccaggattcagagacctcacctctgaggaccagatcgtactgctgaagtcaagtgccattgaggtcatcatgttgcgctccaatgagtccttcaccatggacgacatgtcctggacctgtggcaaccaagactacaagtaccgcgtcagtgacgtgaccaaagccggacacagcctggagctgattgagcccctcatcaagttccaggtgggactgaagaagctgaacttgcatgaggaggagcatgtcctgctcatggccatctgcatcgtctccccagatcgtcctggggtgcaggacgccgcgctgattgaggccatccaggaccgcctgtccaacacactgcagacgtacatccgctgccgccacccgcccccgggcagccacctgctctatgccaagatgatccagaagctagccgacctgcgcagcctcaatgaggagcactccaagcagtaccgctgcctctccttccagcctgagtgcagcatgaagctaacgccccttgtgctcgaagtgtttggcaatgagatctcctgactaggacagcctgtgcggtgcctgggtggggctgctcctccagggccacgtgccaggcccggggctggcggctactcagcagccctcctcacccgtctggggttcagcccctcctctgccacctcccctatccacccagcccattctctctcctgtccaacctaacccctttcctgcgggcttttccccggtcccttgagacctcagccatgaggagttgctgtttgtttgacaaagaaacccaagtgggggcagagggcagaggctggaggcaggccttgcccagagatgcctccaccgctgcctaagtggctgctgactgatgttgagggaacagacaggagaaatgcatccattcctcagggacagagacacctgcacctccccccactgcaggccccgcttgtccagcgcctagtggggtctccctctcctgccttactcacgataaataatcggcccacagctcccaccccacccccttcagtgcccaccaacatcccattgccctggttatattctcacgggcagtagctgtggtgaggtgggttttcttcccatcactggagcaccaggcacgaacccacctgctgagagacccaaggaggaaaaacagacaaaaacagcctcacagaagaatatgacagctgtccctgtcaccaagctcacagttcctcgccctgggtctaaggggttggttgaggtggaagccctccttccacggatccatgtagcaggactgaattgtccccagtttgcagaaaagcacctgccgacctcgtcctccccctgccagtgccttacctcctgcccaggagagccagccctccctgtcctcctcggatcaccgagagtagccgagagcctgctcccccaccccctccccaggggagagggtctggagaagcagtgagccgcatcttctccatctggcagggtgggatggaggagaagaattttcagaccccagcggctgagtcatgatctccctgccgcctcaatgtggttgcaaggccgctgttcaccacagggctaagagctaggctgccgcaccccagagtgtgggaagggagagcggggcagtctcgggtggctagtcagagagagtgtttgggggttccgtgatgtagggtaaggtgccttcttattctcactccaccacccaaaagtcaaaaggtgcctgtgaggcaggggcggagtgatacaacttcaagtgcatgctctctgcaggtcgagcccagcccagctggtgggaagcgtctgtccgtttactccaaggtgggtctttgtgagagtgagctgtaggtgtgcgggaccggtacagaaaggcgttcttcgaggtggatcacagaggcttcttcagatcaatgcttgagtttggaatcggccgcattccctgagtcaccaggaatgttaaagtcagtgggaacgtgactgccccaactcctggaagctgtgtccttgcacctgcatccgtagttccctgaaaacccagagaggaatcagacttcacactgcaagagccttggtgtccacctggccccatgtctctcagaattcttcaggtggaaaaacatctgaaagccacgttccttactgcagaatagcatatatatcgcttaatcttaaatttattagatatgagttgttttcagactcagactccatttgtattatagtctaatatacagggtagcaggtaccactgatttggagatatttatggggggagaacttacattgtgaaacttctgtacattaattattattgctgttgttattttacaagggtctagggagagacccttgtttgattttagctgcagaactgtattggtccagcttgctcttcagtgggagaaaaacacttgtaagttgctaaacgagtcaatcccctcattcaggaaaactgacagaggagggcgtgactcacccaagccatatataactagctagaagtgggccaggacaggccgggcgcggtggctcacgcctgtaatcccagcagtttgggaggtcgaggtaggtggatcacctgaggtcgggagttcgagaccaacctgaccaacatggagaaaccctgtctctattaaaaatacaaaaaaaaaaaaaaaaaaaaatagccgggcatggtggcgcaagcctgtaatcccagctactcaggaggctgaggcagaagaattgaacccaggaggtggaggttgcagtgagctgagatcgtgccgttactctccaacctggacaacaagagcgaaactccgtcttagaagtggaccaggacaggaccagattttggagtcatggtccggtgtccttttcactacaccatgtttgagctcagacccccactctcattccccaggtggctgacccagtccctgggggaagccctggatttcagaaagagccaagtctggatctgggaccctttccttccttccctggcttgtaactccaccaagcccatcagaaggagaaggaaggagactcacctctgcctcaatgtgaatcagaccctaccccaccacgatgtgccctggctgctgggctctccacctcaggccttggataatgctgttgcctcatctataacatgcatttgtctttgtaatgtcaccaccttcccagctctccctctggccctgcttcttcggggaactcctgaaatatcagttactcagccctgggccccaccacctaggccactcctccaaaggaagtctaggagctgggaggaaaagaaaagaggggaaaatgagtttttatggggctgaacggggagaaaaggtcatcatcgattctactttagaatgagagtgtgaaatagacatttgtaaatgtaaaacttttaaggtatatcattataactgaaggagaaggtgccccaaaatgcaagattttccacaagattcccagagacaggaaaatcctctggctggctaactggaagcatgtaggagaatccaagcgaggtcaacagagaaggcaggaatgtgtggcagatttagtgaaagctagagatatggcagcgaaaggatgtaaacagtgcctgctgaatgatttccaaagagaaaaaaagtttgccagaagtttgtcaagtcaaccaatgtagaaagctttgcttatggtaataaaaatggctcatacttatatagcacttactttgtttgcaagtactgctgtaaataaatgctttatgcaaacc

SEQ ID NO: 121 - DNA, 1050 bp, HUMAN
ctcgccagctcttccgctcctctcacagccgccagacccgcctgctgagccccatggcccgcgctgctctctccgccgcccccagcaatccccggctcctgcgagtggcactgctgctcctgctcctggtagccgctggccggcgcgcagcaggagcgtccgtggccactgaactgcgctgccagtgcttgcagaccctgcagggaattcaccccaagaacatccaaagtgtgaacgtgaagtcccccggaccccactgcgcccaaaccgaagtcatagccacactcaagaatgggcggaaagcttgcctcaatcctgcatcccccatagttaagaaaatcatcgaaaagatgctgaacagtgacaaatccaactgaccagaagggaggaggaagctcactggtggctgttcctgaaggaggccctgcccttataggaacagaagaggaaagagagacacagctgcagaggccacctggattgtgcctaatgtgtttgagcatcgcttaggagaagtcttctatttatttatttattcattagttttgaagattctatgttaatattttaggtgtaaaataattaagggtatgattaactctacctgcacactgtcctattatattcattctttttgaaatgtcaaccccaagttagttcaatctggattcatatttaatttgaaggtagaatgttttcaaatgttctccagtcattatgttaatatttctgaggagcctgcaacatgccagccactgtgatagaggctggcggatccaagcaaatggccaatgagatcattgtgaaggcaggggaatgtatgtgcacatctgttttgtaactgtttagatgaatgtcagttgttatttattgaaatgatttcacagtgtgtggtcaacatttctcatgttgaaactttaagaactaaaatgttctaaatatcccttggacattttatgtctttcttgtaaggcatactgccttgtttaatggtagttttacagtgtttctggcttagaacaaaggggcttaattattgatgttttcgga

SEQ ID NO: 122 - DNA, 2754 bp, HUMAN
gaattccgccagccccgccagtccccgcgcagtccccgcgcagtcccagcgccaccgggcagcagcggcgccgtgctcgctccagggcgcaaccatgtcgccatttcttcggattggcttgtccaactttgactgcgggtcctgccagtcttgtcagggcgaggctgttaacccttactgtgctgtgctcgtcaaagagtatgtcgaatcagagaacgggcagatgtatatccagaaaaagcctaccatgtacccaccctgggacagcacttttgatgcccatatcaacaagggaagagtcatgcagatcattgtgaaaggcaaaaacgtggacctcatctctgaaaccaccgtggagctctactcgctggctgagaggtgcaggaagaacaacgggaagacagaaatatggttagagctgaaacctcaaggccgaatgctaatgaatgcaagatactttctggaaatgagtgacacaaaggacatgaatgaatttgagacggaaggcttctttgctttgcatcagcgccggggtgccatcaagcaggcaaaggtccaccacgtcaagtgccacgagttcactgccaccttcttcccacagcccacattttgctctgtctgccacgagtttgtctggggcctgaacaaacagggctaccagtgccgacaatgcaatgcagcaattcacaagaagtgtattgataaagttatagcaaagtgcacaggatcagctatcaatagccgagaaaccatgttccacaaggagagattcaaaattgacatgccacacagatttaaagtctacaattacaagagcccgaccttctgtgaacactgtgggaccctgctgtggggactggcacggcaaggactcaagtgtgatgcatgtggcatgaatgtgcatcatagatgccagacaaaggtggccaacctttgtggcataaaccagaagctaatggctgaagcgctggccatgattgagagcactcaacaggctcgctgcttaagagatactgaacagatcttcagagaaggtccggttgaaattggtctcccatgctccatcaaaaatgaagcaaggctgccatgtttaccgacaccgggaaaaagagagcctcagggcatttcctgggagtctccgttggatgaggtggataaaatgtgccatcttccagaacctgaactgaacaaagaaagaccatctctgcagattaaactaaaaattgaggattttatcttgcacaaaatgttggggaaaggaagttttggcaaggtcttcctggcagaattcaagaaaaccaatcaatttttcgcaataaaggccttaaagaaagatgtggtcttgatggacgatgatgttgagtgcacgatggtagagaagagagttctttccttggcctgggagcatccgtttctgacgcacatgttttgtacatttcagaccaaggaaaacctcttttttgtgatggagtacctcaacggaggggacttaatgtaccacatccaaagctgccacaagttcgacctttccagagcgacgttttatgctgctgaaatcattcttggtctgcagttccttcattccaaaggaatagtctacagggacctgaagctagataacatcctgttagacaaagatggacatatcaagatcgcggattttggaatgtgcaaggagaacatgttaggagatgccaagacgaataccttctgtgggacacctgactacatcgccccagagatcttgctgggtcagaaatacaaccactctgtggactggtggtccttcggggttctcctttatgaaatgctgattggtcagtcgcctttccacgggcaggatgaggaggagctcttccactccatccgcatggacaatcccttttacccacggtggctggagaaggaagcaaaggaccttctggtgaagctcttcgtgcgagaacctgagaagaggctgggcgtgaggggagacatccgccagcaccctttgtttcgggagatcaactgggaggaacttgaacggaaggagattgacccaccgttccggccgaaagtgaaatcaccatttgactgcagcaatttcgacaaagaattcttaaacgagaagccccggctgtcatttgccgacagagcactgatcaacagcatggaccagaatatgttcaggaacttttccttcatgaacccccggatggagcggctgatatcctgaatcttgcccctccagagacaggaaagaatttgccttgtccctgggaactggttcaagagacactgcttgggttcctttttcaacttggaaaaagaaagaaacactcaacaataaagactgagacccgttcgcccccatgtgacttttatctgtagcagaaaccaagtctacttcactaatgacgatgccgtgtgtctcgtctcctgacatgtctcacagacgctcctgaagttaggtcattactaaccatagttatttacttgaaagatgggtctccgcacttggaaaggtttcaagacttgatactgcaataaattatggctcttcacctgggcgccaactgctgatcaacgaaatgcttgttgaatcaggggcaaacggagtacagacgtctcaagactgaaacggccccattgcctggtctagtagcggatctcactcagccgcagacaagtaatcactaacccgttttattctattcctatctgtggatgggtaaatgctgggggccagccctggataggtttttatgggaattc

SEQ ID NO: 123 - DNA, 3606 bp, HUMAN
gcggaagagcagaacgtttgggagtgtgcagctcctgggcccggctcaggcccgtcgcggaggcgcggcgcaggggagcgctcgggtgggagtctcgctcctccaccagtttattgcgacgtagcatccaggcctaggcctccccgtccatccccgccggactcgggcctctggcagcagcgggtgacgcagacggaacatcatgtcgtccgcggccgagcctccgccacccccgcctcccgagagcgcgccttccaagcccgcagcctcgatcgccagcggcgggagcaacagcagcaacaaaggcggccccgaaggcgtcgcggcgcaggcggttgcgtctgcggccagcgctggtcccgcagacgccgagatggaggaaatatttgatgatgcgtcacctggaaagcaaaaggaaatccaagaaccagatcctacctatgaagaaaaaatgcaaactgaccgggcaaatagattcgagtatttattaaagcagacagaactttttgcacatttcattcaacctgctgctcagaagactccaacttcacctttgaagatgaaaccagggcgcccacgaataaaaaaagatgagaagcagaacttactatccgttggcgattaccgacaccgtagaacagagcaagaggaggatgaagagctattaacagaaagctccaaagcaaccaatgtttgcactcgatttgaagactctccatcgtatgtaaaatggggtaaactgagagattatcaggtccgaggattaaactggctcatttctttgtatgagaatggcatcaatggtatccttgcagatgaaatgggcctaggaaagactcttcaaacaatttctcttcttgggtacatgaaacattatagaaacattcctgggcctcatatggttttggttcctaagtctacattacacaactggatgagtgaattcaagagatgggtaccaacacttagatctgtttgtttgataggagataaagaacaaagagctgcttttgtcagagacgttttattaccgggagaatgggatgtatgtgtaacatcttatgaaatgcttattaaagagaagtctgtgttcaaaaaatttaattggagatacttagtaatagatgaagctcacaggatcaaaaatgaaaaatctaagttgtcagaaatagtgagggaattcaagactacaaatagactattattaactggaacacctcttcagaacaacttgcatgagctgtggtcacttcttaactttctgttgccagatgtgtttaattcagcagatgactttgattcctggtttgatacaaacaactgccttggggatcaaaaactagttgagaggcttcatatggttttgcgtccattcctccttcgtcgaattaaggctgatgttgaaaagagtttgcctccaaagaaggaagtaaaaatctatgtgggcctcagcaaaatgcaaagggaatggtatactcggatattaatgaaggatatagatatactcaactcagcaggcaagatggacaaaatgaggttattgaacatcctaatgcagttgagaaaatgttgtaatcatccatatctctttgatggagcagaacctggtccaccttatacaacagatatgcatctagtaaccaacagtggcaaaatggtggttttagacaagctgctccctaagttaaaagaacaaggttcacgagtactaatcttcagtcaaatgacaagggtattggacattttggaagattattgcatgtggagaaattatgagtactgcaggttggatggtcagacaccccatgatgagagacaagactccatcaatgcatacaatgaaccaaacagcacaaagtttgttttcatgttaagcacgcgtgctggtggtcttggcatcaatcttgcgactgctgatgtagtaattttgtatgattctgattggaatccccaagtagatcttcaggctatggaccgagcacatagaattgggcagactaagacagtcagagtgttccgctttataactgataacactgtagaagaaagaatagtagaacgtgctgagatgaaactcagactggattcaatagtcattcaacaagggaggcttgtggatcagaatctgaacaaaattgggaaagatgaaatgcttcaaatgattagacatggagcaacacatgtgtttgcttcaaaggaaagtgagatcactgatgaagatatcgatggtattttggaaagaggtgcaaagaagactgcagagatgaatgaaaagctctccaagatgggcgaaagttcacttagaaactttacaatggatacagagtcaagtgtttataacttcgaaggagaagactatagagaaaaacaaaagattgcattcacagagtggattgaaccacctaaacgagaaagaaaagccaactatgccgttgatgcatatttcagggaagctcttcgtgttagtgaacctaaagcacccaaggctcctcgacctccaaaacaacccaatgttcaggatttccagttctttcctccacgtttatttgaattactggaaaaagaaattctgttttacagaaaaactattgggtacaaggtacctcgaaatcctgagctgcctaacgcagcacaggcacaaaaagaagaacagcttaaaattgatgaagctgaatcccttaatgatgaagagttagaggaaaaagagaagcttctaacacagggatttaccaattggaataagagagattttaaccagtttatcaaagctaatgagaagtggggtcgtgatgatattgaaaatatagcaagagaagtagaaggcaaaactccagaagaagtcattgaatattcagctgtgttttgggaaaggtgcaacgagctccaggacatagagaagattatggctcagattgaaaggggagaggcgagaattcaaagaagaataagcatcaagaaagcacttgacacaaagattggacggtacaaagcaccttttcatcagctgagaatatcatatggtactaacaaaggaaaaaactatactgaagaagaagatcgttttctgatttgtatgcttcacaaacttggatttgacaaagaaaatgtttatgatgaattgcgacagtgtattcgcaactctcctcagttcagatttgactggtttcttaagtccagaactgcaatggagctccagaggagatgtaataccttaattactttgattgaaagagaaaacatggaactagaagaaaaggagaaggcagagaaaaagaaacgaggaccaaagccttcaacacagaaacgtaaaatggatggcgcacctgatggtcgaggaagaaaaaagaagctgaaactatgaatatgtttttgtttcataatcactaactttaaaccagtagttctttaatttacgggtcttcataagatgtactgtacaatgctcaattgttatgtcatttaaagacatcaggttcatctgtttactgagctagaaacatagtatgtagtttcacttttttaaatgcaacagctgtgctgaaatttttttatcattaacacttgaagtaataaaataggcttcatttattaaaaaaaaaaaaaaaa

SEQ ID NO: 124 - DNA, 2751 bp, HUMAN
atggcggaaggtggaggctgccgtgagcgaccggatgcggagactcagaagtccgagcttggacccttaatgaggaccacactccaacgcggggcgcagtggtatcttattgacagccggtggttcaagcagtggaagaagtatgtgggctttgacagctgggacatgtacaatgtgggtgaacataacctatttcctggcccaatagacaactctgggctattttcagatcctgagagtcagaccttgaaagaacacttaattgatgaattggactatgtattggtccctaccgaggcgtggaataaactactaaactggtacggctgtgtagaaggccagcaacccatcgtcagaaaagttgtggagcatggcctgtttgtcaagcactgcaaagtcgaggtgtatttgctggaactgaagctctgtgagaacagtgaccccaccaatgtgctgagttgccatttcagcaaggcagacaccattgcaaccatcgagaaagagatgcggaagctattcaacatccctgcggagcgtgaaacacggctctggaacaaatacatgagcaacacctacgagcagttgagcaagctagacaacactgtccaggatgctgggctataccagggtcaggtgctagtaattgagcctcaaaatgaagatggcacatggcccaggcagaccttgcagtcaaatggatctggcttttctgcttcgtataattgtcaggagccaccatcctctcatatacaacctgggctctgtggacttggaaacctgggaaacacctgcttcatgaactccgctttgcagtgtttgagcaacactgcaccactgactgactactttctcaaagatgagtatgaagccgaaatcaacagagacaaccctctggggatgaaaggggaaattgcagaagcctatgctgaactcattaagcagatgtggtctggaagggacgcccatgtggcacctcgcatgttcaaaactcaagtaggacgttttgctcctcaattttctggctaccagcaacaagattctcaggagctgctggcctttcttctagatggattgcatgaagatctgaaccgggtaaagaaaaagccctacttggagctgaaggatgccaatgggcggccagatgcggtggtggcaaaggaagcctgggagaatcacaggttgaggaatgattctgtgattgtggatactttccatggcctcttcaaatctactttggtttgcccagaatgtgctaaggtttctgtgacctttgacccattttgctatctaacgctgccactgcccttgaagaaagatcgagttatggaggttttcctggttcctgctgaccctcactgcagacctactcagtaccgtgtgactgtgccgctgatgggggctgtgtccgacctgtgcgaggctctctccaggctgtctggcattgctgcagaaaatatggtggtcgcagatgtgtataatcaccgattccacaaaattttccaaatggatgaaggtttaaaccacatcatgcctcgggatgacattttcgtgtacgaggtctgcagcacttccgtggatggctcggaatgtgtcacgcttccagtctacttcagggagaggaagtccaggccatcaagcacttcctccgcatcagcgctatatgggcagccactattgctttctgtccccaagcacaagttaacccttgagtctttgtaccaggctgtttgtgatcgtatcagccgctatgtgaaacagcctttacctgatgagtttggcagctcacccttggagccaggggcctgcaatggctccaggaacagctgtgaaggagaagatgaggaagaaatggagcatcaggaagaaggcaaagagcagctttcagaaacagaaggcagtggggaagatgagccaggaaatgaccccagtgagaccacccaaaagaagatcaaaggccagccctgcccaaaaaggctttttaccttcagtcttgtgaactcctatggaacagctgacataaattcacttgcagctgatggaaaactacttaaactcaactctcgatctacactggccatggattgggacagtgaaactcggagactttactatgatgagcaagaatctgaggcctacgagaagcatgtgagcatgttgcagcctcagaagaagaagaagaccacagtggccctgagagactgcatcgagctcttcaccaccatggagacccttggggagcatgacccctggtactgtcccaactgtaagaagcatcaacaggccacaaaaaagtttgacctatggtccttgcccaagatcctggtggtccacctcaaacgtttctcctacaacagatactggagggataagctcgacacagtcgtagaattcccaatcagagggctgaacatgtccgagtttgtctgtaacctgtcagcaaggccttatgtgtacgacctcattgccgtgtccaatcattatggagccatgggggttggccactacactgcatatgcgaagaacaaactgaatggtaaatggtattactttgatgatagcaacgtgtccctggcctctgaggatcagatagtgactaaagcagcttatgtgctattttaccaacgtcgagatgatgaattttataagacaccttcacttagcagttctggttcctctgatggagggacacgaccaagcagctctcagcagggctttggggatgatgaggcttgcagcatggacaccaactaa

SEQ ID NO: 125 - DNA, 1710 bp, HUMAN
ccgcggcggcggagaagcagctcgccagccagcagcccgccagccgccgggaggttcgatacaagaggctgttttcctagcgtggcttgctgcctttggtaagaacatgtcgtccatcttgccattcacgccgccagttgtgaagagactgctgggatggaagaagtcagctggtgggtctggaggagcaggcggaggagagcagaatgggcaggaagaaaagtggtgtgagaaagcagtgaaaagtctggtgaagaagctaaagaaaacaggacgattagatgagcttgagaaagccatcaccactcaaaactgtaatactaaatgtgttaccataccaagcacttgctctgaaatttggggactgagtacaccaaatacgatagatcagtgggatacaacaggcctttacagcttctctgaacaaaccaggtctcttgatggtcgtctccaggtatcccatcgaaaaggattgccacatgttatatattgccgattatggcgctggcctgatcttcacagtcatcatgaactcaaggcaattgaaaactgcgaatatgcttttaatcttaaaaaggatgaagtatgtgtaaacccttaccactatcagagagttgagacaccagttttgcctccagtattagtgccccgacacaccgagatcctaacagaacttccgcctctggatgactatactcactccattccagaaaacactaacttcccagcaggaattgagccacagagtaattatattccagaaacgccacctcctggatatatcagtgaagatggagaaacaagtgaccaacagttgaatcaaagtatggacacaggctctccagcagaactatctcctactactctttcccctgttaatcatagcttggatttacagccagttacttactcagaacctgcattttggtgttcaatagcatattatgaattaaatcagagggttggagaaaccttccatgcatcacagccctcactcactgtagatggctttacagacccatcaaattcagagaggttctgcttaggtttactctccaatgttaaccgaaatgccacggtagaaatgacaagaaggcatataggaagaggagtgcgcttatactacataggtggggaagtttttgctgagtgcctaagtgatagtgcaatctttgtgcagagccccaattgtaatcagagatatggctggcaccctgcaacagtgtgtaaaattccaccaggctgtaatctgaagatcttcaacaaccaggaatttgctgctcttctggctcagtctgttaatcagggttttgaagccgtctatcagctaactagaatgtgcaccataagaatgagttttgtgaaagggtggggagcagaataccgaaggcagacggtaacaagtactccttgctggattgaacttcatctgaatggacctctacagtggttggacaaagtattaactcagatgggatccccttcagtgcgttgctcaagcatgtcataaagcttcaccaatcaagtcccatgaaaagacttaatgtaacaactcttctgtcatagcattgtgtgtggtccctatggactgtttactatccaaaagttcaagagagaaaacagcacttgaggtctcatcaattaaagcaccttgtggaatctgtttcctatatttgaatattagatgggaaaattagtgtcataaagatc

SEQ ID NO: 126 - DNA, 1568 bp, HUMAN
cgtccttcctcagccgcgggtgatcgtagctcggaaatggcgggatttggtgctatggagaaatttttggtagaatataagagtgcagtggagaagaaactggcagagtacaaatgtaacaccaacacagcaattgaactaaaattagttcgttttcctgaagatcttgaaaatgacattagaactttctttcctgagtatacccatcaactctttggggatgatgaaactgcttttggttacaagggtctaaagatcctgttatactatattgctggtagcctgtcaacaatgttccgtgttgaatatgcatctaaagttgatgagaactttgactgtgtagaggcagatgatgttgagggcaaaattagacaaatcattccacctggattttgcacaaacacgaatgatttcctttctttactggaaaaggaagttgatttcaagccattcggaaccttacttcatacctactcagttctcagtccaacaggaggagaaaactttacctttcagatatataaggctgacatgacatgtagaggctttcgagaatatcatgaaaggcttcagacctttttgatgtggtttattgaaactgctagctttattgacgtggatgatgaaagatggcactactttctagtatttgagaagtataataaggatggagctacgctctttgcgaccgtaggctacatgacagtctataattactatgtgtacccagacaaaacccggccacgtgtaagtcagatgctgattttgactccatttcaaggtcaaggccatggtgctcaacttcttgaaacagttcatagatactacactgaatttcctacagttcttgatattacagcggaagatccatccaaaagctatgtgaaattacgagactttgtgcttgtgaagctttgtcaagatttgccctgtttttcccgggaaaaattaatgcaaggattcaatgaagatatggcgatagaggcacaacagaagttcaaaataaataagcaacacgctagaagggtttatgaaattcttcgactactggtaactgacatgagtgatgccgaacaatacagaagctacagactggatattaaaagaagactaattagcccatataagaaaaagcagagagatcttgctaagatgagaaaatgtctcagaccagaagaactgacaaaccagatgaaccaaatagaaataagcatgcaacatgaacagctggaagagagttttcaggaactagtggaagattaccggcgtgttattgaacgacttgctcaagagtaaagattatactgctctgtacaggaagcttgcaaattttctgtacaatgtgctgtgaaaaatctgatgactttaattttaaaatcttgtgacattttgcttatactaaaagttatctatctttagttgaatattttcttttggagagattgtatattttaaaatactgtttagagtttatgagcatatattgcatttaaagaaagataaagcttctgaaatactactgcaattgcttcccttcttaaacagtataataaatgcttagttgtgat

SEQ ID NO: 127 - DNA, 459 bp, HUMAN
atggcgagcatgcgagtggtgaaggagctggaggatcttcagaagaagcctcccccatacctgcggaacctgtccagcgatgatgccaatgtcctggtgtggcacgctctcctcctacccgaccaacctccctaccacctgaaagccttcaacctgcgcatcagcttcccgccggagtatccgttcaagcctcccatgatcaaattcacaaccaagatctaccaccccaacgtggacgagaacggacagatttgcctgcccatcatcagcagtgagaactggaagccttgcaccaagacttgccaagtcctggaggccctcaatgtgctggtgaatagaccgaatatcagggagcccctgcggatggacctcgctgacctgctgacacagaatccggagctgttcagaaagaatgccgaagagttcaccctccgattcggagtggaccggccctcctaa

SEQ ID NO: 128 - DNA, 2377 bp, HUMAN
ggtgacaaagagccaacagagacaataggagacttgtcaatttgtcttgatgggctacagttagagtctgaagttgttaccaatggtgaaactacatgttcagaaagtgcttctcagaatgatgatggctccagatccaaggatgaaacaagagtgagcacaaatggatcagatgaccctgaagatgcaggagctggtgaaaataggagagtcagtgggaataattctccatcactctcaaatggtggttttaaaccttctagacctccaagaccttcacgaccaccaccacccaccccacgtagaccagcatctgtcaatggttcaccatctgccacttctgaaagtgatgggtctagtacaggctctctgccgccgacaaatacaaatacaaatacatctgaaggagcaacatctggattaataattcctcttactatatctggaggctcaggccctaggccattaaatcctgtaactcaagctcccttgccacctggttgggagcagagagtggaccagcacgggcgagtttactatgtagatcatgttgagaaaagaacaacatgggatagaccagaacctctacctcctggctgggaacggcgggttgacaacatgggacgtatttattatgttgaccatttcacaagaacaacaacgtggcagaggccaacactggaatccgtccggaactatgaacaatggcagctacagcgtagtcagcttcaaggagcaatgcagcagtttaaccagagattcatttatgggaatcaagatttatttgctacatcacaaagtaaagaatttgatcctcttggtccattgccacctggatgggagaagagaacagacagcaatggcagagtatatttcgtcaaccacaacacacgaattacacaatgggaagaccccagaagtcaaggtcaattaaatgaaaagcccttacctgaaggttgggaaatgagattcacagtggatggaattccatattttgtggaccacaatagaagaactaccacctatatagatccccgcacaggaaaatctgccctagacaatggacctcagatagcctatgttcgggacttcaaagcaaaggttcagtatttccggttctggtgtcagcaactggccatgccacagcacataaagattacagtgacaagaaaaacattgtttgaggattcctttcaacagataatgagcttcagtccccaagatctgcgaagacgtttgtgggtgatttttccaggagaagaaggtttagattatggaggtgtagcaagagaatggttctttcttttgtcacatgaagtgttgaacccaatgtattgcctgtttgaatatgcagggaaggataactactgcttgcagataaaccccgcttcttacatcaatccagatcacctgaaatattttcgttttattggcagatttattgccatggctctgttccatgggaaattcatagacacgggtttttctttaccattctataagcgtatcttgaacaaaccagttggactcaaggatttagaatctattgatccagaattttacaattctctcatctgggttaaggaaaacaatattgaggaatgtgatttggaaatgtacttctccgttgacaaagaaattctaggtgaaattaagagtcatgatctgaaacctaatggtggcaatattcttgtaacagaagaaaataaagaggaatacatcagaatggtagctgagtggaggttgtctcgaggtgttgaagaacagacacaagctttctttgaaggctttaatgaaattcttccccagcaatatttgcaatactttgatgcaaaggaattagaggtccttttatgtggaatgcaagagattgatttgaatgactggcaaagacatgccatctaccgtcattatgcaaggaccagcaaacaaatcatgtggttttggcagtttgttaaagaaattgataatgagaagagaatgagacttctgcagtttgttactggaacctgccgattgccagtaggaggatttgctgatctcatggggagcaatggaccacagaaattctgcattgaaaaagttgggaaagaaaattggctacccagaagtcatacctgttttaatcgcctggacctgccaccatacaagagctatgagcaactgaaggaaaagctgttgtttgccatagaagaaacagaaggatttggacaagagtaacttctgagaacttgcaccatgaatgggcaagaacttatttgcaatgtttgtccttctctgcctgttgcacatcttgtaaaattggacaatggctctttagagagttatctgagtgtaagtaaattaatgttctcatttaaaaaaaaaaaaaaaaaaa

SEQ ID NO: 129 - DNA, 3525 bp, HUMAN
  misc_feature (1)..(3525): N=any base
ggcacgaggcatggcgctgaggggccgccccgcgggaagatgaataagggctggctggagctggagagcgacccaggcctcttcaccctgctcgtggaagatttcggtgtcaagggggtgcaagtggaggagatctacgaccttcagagcaaatgtcagggccctgtatatggatttatcttcctgttcaaatggatcgaagagcgccggtcccggcgaaaggtctctaccttggtggatgatacgtccgtgattgatgatgatattgtgaataacatgttctttgcccaccagctgatacccaactcttgtgcaactcatgccttgctgagcgtgctcctgaactgcagcagcgtggacctgggacccaccctgagtcgcatgaaggacttcaccaagggtttcagccctgagagcaaaggatatgcgattggcaatgccccggagttggccaaggcccataatagccatgccaggcccgagccacgccacctccctgagaagcagaatggccttagtgcagtgcggaccatggaggcgttccactttgtcagctatgtgcctatcacaggccggctctttgagctggatgggctgaaggtctaccccattgaccatgggccctggggggaggacgaggagtggacagacaaggcccggcgggtcatcatggagcgtatcggcctcgccactgcaggggagccctaccacgacatccgcttcaacctgatggcagtggtgcccgaccgcaggatcaagtatgaggccaggctgcatgtgctgaaggtgaaccgtcagacagtactagaggctctgcagcagctgataagagtaacacagccagagctgattcagacccacaagtctcaagagtcacagctgcctgaggagtccaagtcagccagcaacaagtccccgctggtgctggaagcaaacagggcccctgcagcctctgagggcaaccacacagatggtgcagaggaggcggctggttcatgcgcacaagccccatcccacagccctcccaacaaacccaagctagtggtgaagcctccaggcagcagcctcaatggggttcaccccaaccccactcccattgtccagcggctgccggcctttctagacaatcacaattatgccaagtcccccatgcaggaggaagaagacctggcggcaggtgtgggccgcagccgagttccagtccgcccaccccagcagtactcagatgatgaggatgactatgaggatgacgaggaggatgacgtgcagaacaccaactctgcccttaggtataaggggaagggaacagggaagccaggggcattgagcggttctgctgatgggcaactgtcagtgctgcagcccaacaccatcaacgtcttggctgagaagctcaaagagtcccagaaggacctctcaattcctctgtccatcaagactagcagcggggctgggagtccggctgtggcagtgcccacacactcgcagccctcacccacccccagcaatgagagtacagacacggcctctgagatcggcagtgctttcaactcgccactgcgctcgcctatccgctcagccaacccgacgcggccctccagccctgtcacctcccacatctccaaggtgctttttggagaggatgacagcctgctgcgtgttgactgcatacgctacaaccgtgctgtccgtgatctgggtcctgtcatcagcacaggcctgctgcacctggctgaggatggggtgctgagtcccctggcgctgacagagggtgggaagggttcctcgccctccatcagaccaatccaaggcagccaggggtccagcagcccagtggagaaggaggtcgtggaagccacggacagcagagagaagacggggatggtgaggcctggcgagcccttgagtggggagaaatactcacccaaggagctgctggcactgctgaagtgtgtggaggctgagattgcaaactatgaggcgtgcctcaaggaggaggtagagaagaggaagaagttcaagattgatgaccagagaaggacccacaactacgatgagttcatctgcacctttatctccatgctggctcaggaaggcatgctggccaacctagtggagcagaacatctccgtgcggcggcgccaaggggtcagcatcggccggctccacaagcagcggaagcctgaccggcggaaacgctctcgcccctacaaggccaagcgccagtgaggactgctggccctgactctgcagcccactcttgccgtgtggccctcaccagggtccttccctgccccacttccccttttcccagtattactgaatagtcccagctggagagtccaggccctgggaatgggaggaaccaggccacattccttccatcgtgccctgaggcctgacacggcagatcagccccatagtgctcaggaggcagcatctggagttggggcacagcgaggtactgcagcttcctccacagccggctgtggagcagcaggacctggcccttctgcctgggcagcagaatatatattttacctatcagagacatctatttttctgggctccaacccaacatgccaccatgttgacataagttcctacctgactatgctttctctcctaggagctgtcctggtgggcccaggtccttgtatcatnccacggtcccaactacagggtcctagctgggggcctgggtgggccctgggctctgggccctgctgctctagccccagccaccagcctgtccctgttgtaaggaagccaggtcttctctcttcattcctcttaggagagtgccaaactcagggacccagcactgggctgggttgggagtagggtgtcccagtggggttggggtgagcaggctgctgggatcccatggcctgagcagagcatgtgggaactgttcagtggcctgtgaactgtcttccttgttctagccaggctgttcaagactgctctccatagcaaggttctagggctcttcgccttcagtgttgtggccctagctatgggcctaaattgggctctaggtctctgtccctggcgcttgaggctcagaagagcctctgtccagcccctcagtattaccatgtctccctctcaggggtagcagagacagggttgcttataggaagctggcaccactcagctcttcctgctactccagtttcctcagcctctgcaaggcactcagggtgggggacagcaggatcaagacaacccgttggagcccctgtgttccagaggacctgatgccaaggggtaatgggcccagcagtgcctctggagcccaggccccaacacagccccatggcctctnccagatggctttgnaaaaggtgatccaancaggcccctttatctgtacatagtgactgagtggggggtgctggcaagtgtggcanctncctctgggctgagcacagcttgacccctctagcccctgtaaanactggatcaatgaatgaataaaactctcctaagnatctcctgagaaaaaaaaaaaaaaaaagg

SEQ ID NO: 130 - DNA, 2553 bp, HUMAN
acgcgtccgggaaacgttgcttctgaggggagcccaagatgaccggttctaacgagttcaagctgaaccagccacccgaggatggcatctcctccgtgaagttcagccccaacacctcccagttcctgcttgtctcctcctgggacacgtccgtgcgtctctacgatgtgccggccaactccatgcggctcaagtaccagcacaccggcgccgtcctggactgcgccttctacgatccaacgcatgcctggagtggaggactagatcatcaattgaaaatgcatgatttgaacactgatcaagaaaatcttgttgggacccatgatgcccctatcagatgtgttgaatactgtccagaagtgaatgtgatggtcactggaagttgggatcagacagttaaactgtgggatcccagaactccttgtaatgctgggaccttctctcagcctgaaaaggtatataccctctcagtgtctggagaccggctgattgtgggaacagcaggccgcagagtgttggtgtgggacttacggaacatgggttacgtgcagcagcgcagggagtccagcctgaaataccagactcgctgcatacgagcgtttccaaacaagcagggttatgtattaagctctattgaaggccgagtggcagttgagtatttggacccaagccctgaggtacagaagaagaagtatgccttcaaatgtcacagactaaaagaaaataatattgagcagatttacccagtcaatgccatttcttttcacaatatccacaatacatttgccacaggtggttctgatggctttgtaaatatttgggatccatttaacaaaaagcgactgtgccaattccatcggtaccccacgagcatcgcatcacttgccttcagtaatgatgggactacgcttgcaatagcgtcatcatatatgtatgaaatggatgacacagaacatcctgaagatggtatcttcattcgccaagtgacagatgcagaaacaaaacccaagtcaccatgtacttgacaagatttcatttacttaagtgccatgttgatgataataaaacaattcgtactccccaatggtggatttattactattaaagaaaccagggaaaatattaattttaatattataacaacctgaaaataatggaaaagaggtttttgaatttttttttttaaataaacaccttcttaagtgcatgagatggtttgatggtttgctgcattaaaggtatttgggcaaacaaaattggagggcaagtgactgcagttttgagaatcagttttgaccttgatgattttttgtttccactgtggaaataaatgtttgtaaataagtgtaataaaaatccctttgcattctttctggaccttaaatggtagaggaaaaggctcgtgagccatttgtttcttttgctggttatagttgctaattctaaagctgcttcagactgcttcatgaggaggttaatctacaattaaacaatatttcctcttggccgtccattattttctgaagcagatggttcatcatttcctgggctgttaaacaaagcgaggttaaggttagactcttgggaatcagctagttttcaatcttattagggtgcagaaggaaaactaataagaaaacctcctaatatcattttgtgactgtaaacaattatttattagcaaacaattgatcccagaagggcaaattgtttgagtcagtaatgagctgagaaaagacagagcatatctgtgtatttggaaaaataattgtaacgtaattgcagtgcatttagacaggcatctatttggacctgtttctatctctaaatgaatttttggaaacattaatgaggtttacatatttctctgacatttatatagttcttatgtccatttcagttgaccagccgctggtgattaaagttaaaaagaaaaaaattatagtgagaatgagattcatttcaatgtaatgcactaaagcagaacacgaacttagcttggcctattctaggtagttccaaatagtatttttgttgtcaaactttaaaatttatattaatttgcaaatgtatgtctctgagtaggacttggacctttcctgagatttattttatccgtgatgtattttttttaattcttttgatacagagaagggtcttttttttttttttaagtatttcagtgaaaacttggtgtaagtctgaacccatcttttgaaatgtattttcttcattgcaggtccacctaatcatcctgtgaaagtggtttctctatggaaagctttgtttgcttcctacaaatacatgcttattccttaagggatgtgttagagttactgtggatttctctgttttctgtcttacaagaaacttgtctatgtaccttaatactttgtttaggatgaggagtctttgtgtccctgtacagtagtctgacgtatttccccttctgtcccctagtaagcccagttgctgtatctgaacagtttgagctctttttgtaatatactctaaacctgttatttctgtgctaataaacgagatgcagaaccc

SEQ ID NO: 131 - DNA, 1125 bp, HUMAN
cccccatgtgacagtgacggggtccccgctccaggagacgctcgagtctgcgtcccggccctcagcactgtccactgtttcggtgccagcagagaccagcaggcccgggacagttggtgtttggccgtgccgctgtctaacttggtgtgcagagtgaattgccgctgccggagcggagagaggcggagcggccaggagagaggggatttctgtcagcgccggcctcgggagctcggagacatgaacggcttcacgcctgacgagatgagccgcggcggggatgcggccgccgcagtggccgcagtggtcgctgccgcggccgccgccgcctcggcggggaacgggaccggcgcgggcaccggggctgaggtgccgggcgcgggggcggtctcagcggctgggcccccgggggcggccgggccgggccccgggcaactgtgctgcctgcgggaggatggtgagcggtgcggccgggcggcaggcaacgccagcttcagcaagaggatccagaagagcatctcccagaagaaggtgaagatcgagctggataagagcgcaaggcatctttacatatgtgattatcataaaaacttaattcagagtgttcgaaacagaagaaagagaaaagggagtgatgatgatggaggtgattcacctgttcaagatattgataccccagaggttgatttataccaattacaagtaaatacacttaggagatacaaaagacacttcaagctaccaaccagaccaggacttaataaagcacaacttgttgagatagttggttgccactttaggtctattccagtgaatgaaaaagacaccttaacatatttcatctactcagtgaagaatgacaagaacaaatcagatctcaaggttgatagtggtgttcactaggagacgtggaattgagactaataacttggatgttaacactgtttactgttttttcacatgtagaaatgttctttgtgtattttttctacagaggattttctctgattttattttctttgtttctgactctaataattagttggaaactcatataaaatgagctttcctaaattaaatctattttaaataaaggttattactattaaaaaaaaaaaaaaaaaa

SEQ ID NO: 132 - DNA, 751 bp, HUMAN
aggatgatcaagctgttctcgctgaagcagcagaagaaggaggaggagtcggcgggcggcaccaagggcagcagcaagaaggcgtcggcggcgcagctgcggatccagaaggacataaacgagctgaacctgcccaagacgtgtgatatcagcttctcagatccagacgacctcctcaacttcaagctggtcatctgtcctgatgagggcttctacaagagtgggaagtttgtgttcagttttaaggtgggccagggttacccgcatgatccccccaaggtgaagtgtgagacaatggtctatcaccccaacattgacctcgagggcaacgtctgcctcaacatcctcagagaggactggaagccagtccttacgataaactccataatttatggcctgcagtatctcttcttggagcccaaccccgaggacccactgaacaaggaggccgcagaggtcctgcagaacaaccggcggctgtttgagcagaacgtgcagcgctccatgcggggtggctacatcggctccacctactttgagcgctgcctgaaatagggttggcgcatacccacccgccgccacggccacaagccctggcatcccctgcaaatatttattgggggccatgggtaggggtttggggggcggccggtgggggaatcccctgccttggccttgcctccccttcctgccacgtgcccctagttattttttttttaacaccaggctaactaaaggggaatgttactgc

SEQ ID NO: 133 - DNA, 2845 bp, HUMAN
agcaccaaatccaagatggcggccagcaggaggctgatgaaggagcttgaagaaatccgcaaatgtgggatgaaaaacttccgtaacatccaggttgatgaagctaatttattgacttggcaagggcttattgttcctgacaaccctccatatgataagggagccttcagaatcgaaatcaactttccagcagagtacccattcaaaccaccgaagatcacatttaaaacaaagatctatcacccaaacatcgacgaaaaggggcaggtctgtctgccagtaattagtgccgaaaactggaagccagcaaccaaaaccgaccaagtaatccagtccctcatagcactggtgaatgacccccagcctgagcacccgcttcgggctgacctagctgaagaatactctaaggaccgtaaaaaattctgtaagaatgctgaagagtttacaaagaaatatggggaaaagcgacctgtggactaaaatctgccacgattggttccagcaagtgtgagcagagaccccgtgcagtgcattcagacaccccgcaaagcaggactctgtggaaattgacacgtgccaccgcctggcgttcgcttgtggcagttactaactttctacagttttcttaatcaaaagtggtctaggtaacctgtaaagaaaggattaaaaatttaagatgttctagttctgctctctttgttttaaaaatcactgcttcaatctacttcaaaagaatggtgtttcttttcttgtccaattttatccaaaatcttcaagttacatttaacccataaggtttaaaaaaaaggaaaaaaaacggttgtggttccctttcttccctacccttgccactcccactttctggcaccgagtttatttttcacttacttacttccccagaccccgggctcgcctccacaaaggagaagagactgccctggcggtcctggtggcttttcttagcatgtgtggcactgttgcccagtgtgggagttggtttaaattctcctgactccagtttataacatccttttaaaaaatttaaaaacaaacagccacacccctcctccagtccttctcctcagttcttgtgtgaaactccagctgatgttaccacagtaacatcagttaattgggcaagccctgatgtcagtgtgtgtaactgacctctggcctggcctgcacagagaagccctataatcacaggtctgtggtggccccgaaatggggggcctgctagtcaggaggatgctgtgcacactgtgtgtgatgaatctcgccagaaaggctcctgaggtcccaggttggcacttctccctgcagccattgtagaagatctgctggtccttgcaggcaaagctacagccagaatgtccgtttgaaactcctagctcatctgtcaccgagcttcatccgaatgtgccacggagcttgctctccacttcctccgtgcagtggccctgccacagccctccctcggcacactttgaccctttgtaggattggaattagcaggactcggctatttaaagcaccagtctggggtcgcctgggcccctgctgaccccctcctccagagcagccagcccagcccgggaacaagacggacttcctctcccttcggactcacagcctttgcagagtcaagctccacttgaagctcactcagtaatatcctttcaatgtgttttatattgttttgactgcctttttttgtagaaataaaaattgaccttagaatttatcgtcagataaacttgtaaagatttgaatattaatgtcttttcaaggcaaatgggattgtccccgcactagtagagaatccatgtcgctctgacaccccaaggaagccgacgatccaaatgccgtgtgtcaccaaccccgcttctgccactggcggcttcccttcttggctcttgggggggactagatcctgtggagaagatgacttaaactttgctttttgttttaattttaattctataacttgagatctttccggggcctacaggcgtgtaagacagcttggtctggtctgtgcagaagtggggagtgatgggcaggttcggcagcctaacattgttcaggcgcatggcccctgcggtgtgtacacgaactcggcttcttttgtcctaggtacgccaagggcaggtttctggagactcccttgtgcccgggatggcaagggcaccgggctggcgtttccacatctgtcttcattagcagaaaagtgatgatggattttatttcactcacactccagtttgtaataaaatgccaaattctgtcagctatccaaacaagccaccatttgttcttgttgcttctctggatccagaaatgttgccattcttggaaactgtcccattgcttcgtatttctgccaacgtagctctgcctgcctgtcaacccctcactgcactctgctcatcacgggaggatacctgtgtgccggcagcccctcagggactctcagccctggcactggcaccccagggttggccccgtcagcagaggcttggctttcgagccagtgggtgtctctcctttgggcctgggcggcttgctcctgccagccatgccttcagggtaggctctgagcaagctggcgaacagccctggctgctccaaaaccaaaaagctgggtcctctggaggaggggcgagctgtggagcagccacccactgctgccccaagctcactcaggaattcacacccgcctggtttcttgaagtgtgctgggtccttccctctgctccctactccccaccacggcagagaataggctttctaagatgctgcgatcccgttctgctgcccgtaataaaaatgctctcagacactg

SEQ ID NO: 134 - DNA, 2816 bp, HUMAN
atggtattttacttttttgggaaatacttggaaatgaagacctgcaactgtaatttgaaataaggaaaactttaattttcagtataaaaattgctcaaatagaattgcctgattttaatgacaaaagtatatgggagtccacatttatgtaagaaatgaaactataaaatgtataaataatttgcaaatcagaattgctgtcgaaagttttactataatgaaagatattttcatactctcaaaaatatagaggaaaggggccaagattatagtaccagtcacaatcttttgatgaggacgaaatgaatcaggtaacagactgggttgacccatcatttgatgattttctagagtgtagtggcgtctctactattactgccacatcattaggtgtgaataactcaagtcatagaagaaaaaatgggccttctacattagaaagcagcagatttccagcgagaaaaagaggaaatctatcttccttagaacagatttatggtttagaaaattcaaaagaatatctgtctgaaaatgaaccatgggtggataaatataaaccagaaactcagcatgaacttgctgtgcataaaaagaaaattgaagaagtcgaaacctggttaaaagctcaagttttagaaaggcaaccaaaacagggtggatctattttattaataacaggtcctcctggatgtggaaagacaacgaccttaaaaatactatcaaaggagcatggtattcaagtacaagagtggattaatccagttttaccagacttccaaaaagatgatttcaaggggatgtttaatactgaatcaagcttccatatgtttccctatcagtctcagatagcagttttcaaagagtttctactaagagcgacaaagtataacaagttacaaatgcttggagatgatctgagaactgataagaagataattctggttgaagatttacctaaccagttttatcgggattctcatactttacatgaagttctaaggaagtatgtgaggattggtcgatgtcctcttatatttataatctcggacagtctcagtggagataataatcaaaggttattgtttcccaaagaaattcaggaagagtgttctatctcaaatattagtttcaaccctgtggcaccaacaattatgatgaaatttcttaatcgaatagtgactatagaagctaacaagaatggaggaaaaattactgtccctgacaaaacttctctagagttgctctgtcagggatgttctggtgatatcagaagtgcaataaacagcctccagttttcttcttcaaaaggagaaaacaacttacggccaaggaaaaaaggaatgtctttaaaatcagatgctgtgctgtcaaaatcaaaacgaagaaaaaaacctgatagggtttttgaaaatcaagaggtccaagctattggtggcaaagatgtttctctgtttctcttcagagctttggggaaaattctatattgtaaaagagcatctttaacagaattagactcacctcggttgccctctcatttatcagaatatgaacgggatacattacttgttgaacctgaggaggtagtagaaatgtcacacatgcctggagacttatttaatttatatcttcaccaaaactacatagatttcttcatggaaattgatgatattgtgagagccagtgaatttctgagttttgcagatatcctcagtggtgactggaatacacgctctttactcagggaatatagcacatctatagctacgagaggtgtgatgcattccaacaaagcccgaggatatgctcattgccaaggaggaggatcaagttttcgacccttgcacaaacctcagtggtttctaataaataaaaagtatcgggaaaattgcctggcagcaaaagcactttttcctgacttctgcctaccagctttatgcctccaaactcagctattgccataccttgctctactaaccattccaatgagaaatcaagctcagatttcttttatccaagatattggaaggctccctctgaagcgacactttggaagattgaaaatggaagccctgactgacagggaacatggaatgatagaccctgacagcggagatgaagcccagcttaatggaggacattctgcagaggaatctctgggtgaacccactcaagccactgtgccggaaacctggtctcttcctttgagtcagaatagtgccagtgaactgcctgctagccagccccagcccttttcagcccaaggagacatggaagaaaacataataatagaagactacgagagtgatgggacatagaagccagcctgctaatcagattgctacttcacagcttcatttttgtttcattcagtggtacttcagcagagttaatatgcttttctgatgaattacacaacagtttgttaattcttcattcttgtagtatttcatcacaagaaacctactcttctgtcatcttgaagtaaatagaagatcaagccttcaaatctcttaattttttcggtatttattaaatctgtgagtggtttaaggagcggtcagtgtgtataaagtgtgtttgaacattatgccaaatatcaagatgtgaaggactaattcaggatgcaaaaacgttattggggggttgtaaatatcaactattcaacagtttaggatgcaattacgagtgtaaactgtgtgccttatttacactttattgtctcccgcttctcagatagttttgatgtgttgtacagtggaatatcttagatactttttggaaagtatttacataagttatatcacaattaaaatgtt

SEQ ID NO: 135 - DNA, 1386 bp, HUMAN
gccccatctccttgggctgcccgtgcttcgtgctttggactaccgcccagcagtgtcctgccctctgcctgggcctcggtccctcctgcacctgctgcctggatccccggcctgcctgggcctgggccttggttctccccatgacaccacctgaacgtctcttcctcccaagggtgtgtggcaccaccctacacctcctccttctggggctgctgctggttctgctgcctggggcccaggggctccctggtgttggcctcacaccttcagctgcccagactgcccgtcagcaccccaagatgcatcttgcccacagcaccctcaaacctgctgctcacctcattggagaccccagcaagcagaactcactgctctggagagcaaacacggaccgtgccttcctccaggatggtttctccttgagcaacaattctctcctggtccccaccagtggcatctacttcgtctactcccaggtggtcttctctgggaaagcctactctcccaaggccacctcctccccactctacctggcccatgaggtccagctcttctcctcccagtaccccttccatgtgcctctcctcagctcccagaagatggtgtatccagggctgcaggaaccctggctgcactcgatgtaccacggggctgcgttccagctcacccagggagaccagctatccacccacacagatggcatcccccacctagtcctcagccctagtactgtcttctttggagccttcgctctgtagaacttggaaaaatccagaaagaaaaaataattgatttcaagaccttctccccattctgcctccattctgaccatttcaggggtcgtcaccacctctcctttggccattccaacagctcaagtcttccctgatcaagtcaccggagctttcaaagaaggaattctaggcatcccaggggaccacacctccctgaaccatccctgatgtctgtctggctgaggatttcaagcctgcctaggaattcccagcccaaagctgttggtctgtcccaccagctaggtggggcctagatccacacacagaggaagagcaggcacatggaggagcttgggggatgactagaggcagggaggggactatttatgaaggcaaaaaaattaaattatttatttatggaggatggagagaggggaataatagaagaacatccaaggagaaacagagacaggcccaagagatgaagagtgagagggcatgcgcacaaggctgaccaagagagaaagaagtaggcatgagggatcacagggccccagaaggcagggaaaggctctgaaagccagctgccgaccagagccccacacggaggcatctgcaccctcgatgaagcccaataaacctcttttctctg

SEQ ID NO: 136 - DNA, 1860 bp, HUMAN
cgtgaacggtcgttgcagagattgcgggcggctgagacgccgcctgcctggcacctaggagcgcagcggagccccgacaccgccgccgccgccatggagtccgagaccgaacccgagcccgtcacgctcctggtgaagagccccaaccagcgccaccgcgacttggagctgagtggcgaccgcggctggagtgtgggccacctcaaggcccacctgagccgcgtctaccccgagcgtccgcgtccagaggaccagaggttaatttattctgggaagctgttgttggatcaccaatgtctcagggacttgcttccaaagcaggaaaaacggcatgttttgcatctggtgtgcaatgtgaagagtccttcaaaaatgccagaaatcaacgccaaggtggctgaatccacagaggagcctgctggttctaatcggggacagtatcctgaggattcctcaagtgatggtttaaggcaaagggaagttcttcggaacctttcttcccctggatgggaaaacatctcaaggcctgaagctgcccagcaggcattccaaggcctgggtcctggtttctccggttacacaccctatgggtggcttcagctttcctggttccagcagatatatgcacgacagtactacatgcaatatttagcagccactgctgcatcaggggcttttgttccaccaccaagtgcacaagagatacctgtggtctctgcacctgctccagcccctattcacaaccagtttccagctgaaaaccagcctgccaatcagaatgctgctcctcaagtggttgttaatcctggagccaatcaaaatttgcggatgaatgcacaaggtggccctattgtggaagaagatgatgaaataaatcgagattggttggattggacctattcagcagctacattttctgtttttctcagtatcctctacttctactcctccctgagcagattcctcatggtcatgggggccaccgttgttatgtacctgcatcacgttgggtggtttccatttagaccgaggccggttcagaacttcccaaatgatggtcctcctcctgacgttgtaaatcaggaccccaacaataacttacaggaaggcactgatcctgaaactgaagaccccaaccacctccctccagacagggatgtactagatggcgagcagaccagcccctcctttatgagcacagcatggcttgtcttcaagactttctttgcctctcttcttccagaaggccccccagccatcgcaaactgatggtgtttgtgctgtagctgttggaggctttgacaggaatggactggatcacctgactccagctagattgcctctcctggacatggcaatgatgagtttttaaaaaacagtgtggatgatgatatgcttttgtgagcaagcaaaagcagaaacgtgaagccgtgatacaaattggtgaacaaaaaatgcccaaggcttctcatgtgtttattctgaagagctttaatatatactctatgtagtttaataagcactgtacgtagaaggccttaggtgttgcatgtctatgcttgaggaacttttccaaatgtgtgtgtctgcatgtgtgtttgtacatagaagtcatagatgcagaagtggttctgctggtaagatttgattcctgttggaatgtttaaattacactaagtgtactactttatataatcaatgaaattgctagacatgttttagcaggacttttctaggaaagacttatgtataattgctttttaaaatgcagtgctttactttaaactaaggggaactttgcggaggtgaaaacctttgctgggttttctgttcaataaagttttactatgaatgaccctg

SEQ ID NO: 137 - DNA, 1606 bp, HUMAN
cgaggtcagctacgtaaatccctttgcggcgggataaataaagaaaacaggaaaggaggaaagcattgattacaaatatcttaacaatgagcaaatgtgcaaggaaaaaatatattaagacaaatccaagacaaatgaccatggaaacagttgaatcccagcatgatggaagtataacagcttctttgacagagagcaagtctgctcatgtgcagactcagactggccaaaattcaatccctgctttagctcaggtagcagcaattgcagagacagatgaatctgcagaatcagaaggtgtaattgactctcataaacgtagagaaatcctttcacgaagaccctcttataggaaaatactgaatgaactgtcctctgatgtgcctggtgttccaaagattgaagaagagagatcagaggaagaaggaacaccacctagtattgctaccatggcagtaccaactagcatatatcagactagcacggggcaatacaatgaggaaactgaacttgccccaagtcacatggctgctgccactggtgacatgccaacttaccagatccgagctcctactgctgctttgccacagggagtggtgatggctgcatcgcccggaagtttgcgcagtccccagcagctggcagaagaagcaacacgcaaacgagagctgaggctaatgaaaaacagggaagctgcccgggagtgtcgcaggaagaagaaagaatatgtcaaatgtcttgaaaatcgtgtggctgtgcttgaaaaccaaaacaagactctcattgaggaactcaaggccctcaaagatctttattgccataaagtagagtaactgtctttgacttggaccttgtttactctaactaaggcaggagatgcagcagtcctacttattgccatgtggacttgtgggaaggacacgtgtgacctaagaatccagtttggattagtgtttgaaattgaattgggaatgttgttccaggatgtggaatgcagccgtgatcacacttaccgagcttactttgatctgtttgtcaatagcatgcaaaaaagctttgtttgccctttgcttctgctttttttcagggaagctgccaaagaatgtcgacgtcgaaagaaagaatatgtaaaatgtctggagagccgagttgcagtgctggaagtccagaacaagaagctgatagaggaacttgaaaccttgaaagacatttgttctcccaaaacagattactagaaattatttaactatgaactgaaggcagcatgtatagttgcttttgaaggaatacaatatatagctggcaagaatggtggcttcttttctttgtatcattcatcttcttctttaatcattcatcttcttctttaatcacttaacattcctaaaaatgcttcactgtacgtagttaagtcgtagctataacttcaaattttttaaaagggacaaactgtaaaaaatgtgtgtattcttaaaatgcaatatttgtaaggcttgttccaatgccacatacttgcagctcccattctatgtgtcatcaatagtgtcctatgcaataaattatttgcaggtctttaaatcattttaggaaggatgacaaaataagt

SEQ ID NO: 138 - DNA, 4894 bp, HUMAN
cgaaaacggagaaaccccgggtccggcgagaggggctgtgacagtcggagtcccaagctgcggttcggctgctgccgagaactgcaaggtgtggaatatttctggcttctagtccaatgccaagtgtgtgacctgtggctacatgattccctgaaagataagaacaatgttatgttggggatattggtctctgggccaacctggtatcagcaccaacctgcagggaattgtggctgagccccaggtgtgtgggttcatatctgacagaagtgtcaaggaagtggcctgtgggggaaaccactctgtgttcctgctggaagatggggaagtttacacatgtggtttgaacaccaaggggcaactgggccatgagagggaaggaaacaagccagaacaaattggagctctggcagatcagcatatcattcatgtggcatgtggcgagtcccacagtctggccctcagtgaccgaggccagctgttttcttggggtgcagggagtgatggtcagctaggactcatgactactgaggattctgtggcagtgcccaggttaatacaaaagctgaaccagcaaacaatattacaagtttcctgtggcaactggcattgcttggctcttgcggctgatggccagttcttcacctggggaaagaacagccatgggcagcttggcttagggaaggagttcccctcccaagccagcccacagagggtgaggtccctggaggggatcccactggctcaggtggctgccggaggggctcacagctttgccctgtctctctcaggagctgtttttggctgggggatgaataatgccgggcagctagggctcagtgatgaaaaagatcgagaatctccatgccatgtaaaactcttacgcacgcaaaaagttgtctatattagttgtggagaagaacacacagcagttctcacaaagagtggaggtgtgtttacctttggcgctggttcctgtgggcaacttggacacgactccatgaatgatgaggttaaccctagaagagttctagagctgatgggtagtgaagtaactcaaattgcttgtggcagacaacataccctagccttcgtgccttcttctggactcatctatgcatttggttgtggagcaagaggtcaattaggaactgggcacacttgtaatgttaagtgcccatctcctgtcaagggttactgggctgcccacagtggccagctttcagcccgagctgatcgctttaaatatcatatcgttaagcagatcttctctggaggagaccagacttttgtactttgctccaaatacgagaattattctcctgctgttgacttcaggactatgaaccaagcacattataccagtttaataaatgatgaaaccatagcagtttggagacaaaaactctcagaacacaacaatgcaaatacaatcaatggtgttgttcagatattatcttctgcagcctgttggaatggaagttttcttgaaaaaaaaattgatgaacattttaaaacgagtcccaaaatccctgggattgacctgaactcaactagggtgttatttgagaagttaatgaactctcagcactccatgattctagaacagattttgaacagttttgaaagttgtctgattccccagttgtcaagctcaccaccagatgttgaagccatgagaatctatttaatactacctgagtttcccctactccaggattccaagtattatataacattgactattcccttggctatggccattcttcggctggatacaaaccccagcaaagtactagataactggtggtctcaggtatgcccgaaatatttcatgaagctggtaaacctctataaaggtgcagtcctttatctactgaggggaagaaagacattcttaattcccgtactgtttaacaattatatcacagcagctctcaaactcttggagaagttatataaggtaaatcttaaagtgaagcatgtggaatatgatacattttacattcctgagatttccaatctcgtggacattcaggaagactacctcatgtggttcttgcatcaagcagggatgaaggctagaccatcaataatacaggatactgtaacactttgttcctaccctttcatctttgatgcccaagccaagaccaaaatgttacagacagatgctgaactacagatgcaggtggcagtcaatggagccaacctgcagaatgtcttcatgcttctcaccctggagcctctgctggccagaagccccttcctggtccttcacgttcgcaggaacaaccttgttggagatgccctaagagagctgagcattcattctgatattgatttgaaaaagcctctcaaagtaatctttgatggtgaagaagcagtggatgccggtggtgttacaaaggaattttttcttttgctgttaaaagaacttttgaatcccatctatggaatgtttacctactatcaagattcaaatctcttgtggttttcagacacgtgttttgtagagcacaactggtttcacttgattggtataacctgtggactagctatctacaactccactgtggtcgatctccacttcccattggctctctacaagaagttactcaatgtaaagcctggcttggaagacttaaaggagttgtcacccactgaaggaaggagtctccaagagcttttagattaccccggggaggatgtggaggagactttctgcctcaacttcacgatctgccgagaaagctatggagtgattgaacagaagaagctgatacctgggggagataatgtaactgtgtgcaaggataacaggcaggaatttgtggatgcttatgtgaattatgtcttccaaatctcagttcatgaatggtacacagccttctctagtggcttcctaaaggtgtgtggtggcaaagtacttgagctcttccagccttcagaactgagggctatgatggtggggaacagcaactacaactgggaagaactggaagagactgccatctacaagggagattactcggccacacatcccactgtaaaactattttgggaaacatttcatgagtttccattggaaaagaagaagaagtttctcttgttcctgacaggcagcgatcggattcccatctacggcatggccagtctgcagattgtcatccagtccacagccagcggggaggagtacttgccggtggcccacacttgctacaaccttcttgacctccccaagtacagcagcaaagagattctgagtgcccggctgacccaggcccttgacaactatgaagggtttagtttggcctgaggcttctcagcttgtccagtatttcccttcgttcctcagtgtccacattgaggcctatacagaaaatcatggggagtgatttctatttttttattgtctaagtgggttgggacttttaaatactgagcctggttgatgtgtttctgggattgtatagcagtaaacaacctttttgaaaaattagaggttggggatggggtgaaaaattggcccttgtatgggaggtgtttttgtttttgttttaaaccaaactacccagtattccttgcacttgtgaatgtgttgcactctgctggatgaaatggcagtggatttttaaactttaatttcccaaatgtctctctcagccctgatgttttctcacagtgcttccttgtccttctcttaacttctcattcctctataagaatgatttagactgacctgtccttttttatctgcgcatgcgagaacatcaccttcctctgtacacttggaaatgcctctggcttgttgcagccctcctttaacccaaaggaggaaaggactgcttcagaaactcccaattccaaaaagctgagtctgggtccattattttggcagaactcctaagaatttatgggagcctatataaacatatcttgcttttaaaaagttcttgagggaatagcaactttcccatggctgtgcctatttcctagaccttttaaaagatgtgcagagcagcttagcattcgttgcagctgagcctaattttttcttgctcatccttgtccctttgacaataaggttaattgatagacccaccacctcttgcactctcgcttttggagcaagttgcattaactattttgagtctctatattgtccaagaaaagtagaaataataaatttactttccctttttctatcaccttatgtcctctaccattttctccttcctcccttcccttattttctccttttcgtaccctgtgtcctccctgattttcctttcgtttcttctttattttatcccattctctgttacttgactcagtgctcccttcctctcctctccttctagtggatgcatgcagcctttttttcaatttttatttaaattgcaaaatttttactcagattttttttcctcttccctaattgctaagatttaaggacgttctttattatgaaactttatcacattcgaaatgtttgtttacagtgggattttaggggggattgtgtttaaatcaaatatatgtattttaaaaataatgacatgctcaaccttcctcatcatggagtaagaaaattctacatgattaaagaatccatgtaagtctaattttaaattcctagtaactagagaaaagacttatttatataaaatgaagtatttatgaactgtgataaagcatcaaatcttgatgaaggattgtagatttttgctttttctttttgtttttaaaacttattccaattgctaaattggtagtttttcagtctttataaatacaggattaaaaatatatatacagttatatgaaatgtttattttctatgtgtgtgcatatagttcaatattatgcaataaatttggtgttttaactt

SEQ ID NO: 139 - DNA, 5323 bp, HUMAN
cggggctggaggcggtggctgcggttgcgggaccggcactatgctgggccttcctaccacttgtgtgtggcttggtagtggcctagggtctctcctccctgctgaagtccctctcctgcaggtggccgtctgcccggcccagcaccatgcacacgcttgtgttcttgagcacacggcaggtgctgcagtgccagccagctgcctgccaggccctgcccctgctgccacgcgaactcttccccctgctgttcaaggtggccttcatggacaagaagacagtggtactgcgcgagttggtacacacgtggcccttcccgctgctcagtttccagcagctgctacaggagtgtgcccactgcagccgtgccctcctgcaggagcggcctagcactgagagcatgcaggctgttatcctggggctgactgcccggctccacacctcagagcctggggccagcacacagcccctctgcaggaagcatgcgctgcgggtgctggacatgacgggcctcttggatgatggtgtggaacaggatcctggcaccatgagcatgtgggactgtactgctgccgtagctcgcacatgcattgcccagcagcagggtggggccgcagagcctgggccagcccccatccccgtggaggtgcgcgtggacctgcgggtgaaccgggcctcctatgcgttcctgcgggaggcactccgaagcagcgtgggcagcccgctgcggctctgctgccgggacctgcgagctgaggacctgcccatgcgcaacactgtggccctgctgcagcttctggatgcaggctgcctgcgccgcgtggacctgcgcttcaacaatctgggcctgcgcggcctgtctgtgatcatcccacacgtggcccgcttccagcacctggccagcctgcggctccactatgtgcatggggattcaaggcagccctccgtggatggcgaggacaacttccgctacttccttgcccagatgggccgcttcacctgtctgcgtgagctcagcatgggctcctctctcctttcagggaggctggaccagctgctcagcaccctgcagagccccctggagagcctggagttggccttctgtgctctgctgcctgaggacctacgcttcctggcacggagcccacatgctgcccacctcaagaagttggacctgagtggtaacgacctgtctggcagccagctggcacccttccagggtctgttgcaggcatcagcagccacactgttgcatctggagctgactgagtgtcagctcgcagacacccagctgttggccacactacccatcctgactcagtgcgccagtctccggtaccttggcctctatggcaacccactgtccatggcgggcctcaaggagctgctgcgggactcagtggcacaggctgagctgcgtactgtggtgcaccccttccctgtggactgctatgagggcttgccctggccgccgcctgcctctgtcctgctggaggcctccatcaatgaggagaagtttgcccgcgtagaagctgagttgcaccagctgcttctagcctcaggccgtgcccatgtgctctggaccacggacatctacgggcgactggctgcggactacttcagcctatgatgaagtagctctgggtgagacacaggccgccctgcagtctctttaggtaggcagggcctttgctgggacccctggtggaggccttcacaaaagcactggttactggtttcctgctgggtctaccttgcttctgggcacacctcaagcctcccctgctttctgcagtgccccacgcggttttccctgcacttgctccataattggctgatcatctgtgggccccggggctggatgtcaggcctccattgccctgctcagtttggctgcatttggctgccgtctggggtcctggtcctttgtgcaaatgctttgggattccagttgtgagctgagagagatgatggcctctctgggcctttcctctccctttactgagagctcagtgcttctggggttgaagttggacagaggcctgcttcagggaagctgggagtccccaggcactcacgcctcttacgtgttccctaccctgccacccagccaccccactgggctgggctcgggctggagggggtcatcaaggtacacatgtgcctggaagttgaatttgtggctgtttttttttctgtccacgttggtcacccttatccttatctctgctgtcacccccaacatggccaccgggcaacaactgccatccagcctgtcgccccgcccttcgcggggcagccccgtcggcactgccggccagtccttgctcttcccacctttcggaggcccaagatcctactgtggccggccagggccagcgagggaccccccccatgcagagctggaggttggggtgatgtcttttcggaagagcttcaagggaggtgttggggcctccccggccaccttccattgctaccccaggattcccgagtgcaacgttcccggctcgcgccccacacacggctcagcgcacactgcgcggcttccacctttactgacggagcatgcgcgaggccgcaccggccaatctccggcgcccacgtcatccgcgcgcccgcggccctagcagtggatctcgtaggcgaccggcgggggcacgcggagtcccggccccgccccctgttccgggccgcagtcagcgggcgcctccgccggaccctcggcgaagagcggcttggagcggttgatgacgaacatctcgtggccgcgctcgtcgcggagctcctctagctgtgcgaacgtacaggggccgtccaagtagtcgttgacgaacagcgctccctcccccggaggcccccgcgccttttttcgcctgcggcgccggcgacagatcatggcgaccaggagcagcgccgtgagcgccagcagcgcgatggccgccgcaatggccgtctgtgtggccacgcccagggcgcggaaggccatgctgcccgcctcgggccggggctcgctgccggcggggcgggcggccggaggcggcggttgcgcgggctgctgcggctgctgccgggacgcgttgaccaggagccggaagggcacgcgggcagcgccgccggcgttggaggcctcgcactcgtacttaccggcgtgcgccagcgtgatgttgctgaggaagagcatgccgctgcccgtgtcggatgccgagtgtccgcccaggcccagcaacccgccttctagctgggcctgggctcgcggccggccctcgcgaggctggggcacctttctccaggtcaccaatggctgcgggtagccggaggcttggcaggcaacccgcaggtcctcacccaggttggctgtgagctccagcggctgcacgtggacagagggcggaatgcagatgaggctgctgtgggatacgtccaggagactctggagcgccaggcgcgggggctctgcacacatgatcttcctgtccctggaggtgagcagccgctggccgccctccttgatccaggcccccagccagtgcagggcgcagtcacagcgccatgggttctctgtgggagagcagcgttaggcaggtggcttgagggtgctgctaaaacagcctgtgcagttggggttttgcaggccaggacagaggcctctttcccacctcccacagcgttttcacacggagtccaaggccctgccaccccttccttgaccccaagctccttggggcggcaggcccttcaccctcgcccccctcccctttagctctgtgatgcctgcctgttacagatcacttctccgtcggtctctgagaaagcacctgctccttaagtcttcctgcaacaagtgccactgtttttaggaacctgggcgtccacatagacatctcaccagcactgaaacctcacaagtcctctcagctttgcctttggatgccctctcttgggaatgtccccagtcctggtcagctgtctctctcctttgcaattttgtctgcctcccctcagcctaaaagtgtgcagaaccctcaattctgttaagtcaccctgtggagttcctgtcttctgttttccccaggcagggtgcctgagctgtatcccccagcacacccactcccgcagccctccagtgtggctgcaggcggtggtgcagccttccagactgctgcccagttgcctgatgtcagagcccctccacacatgagcctgctccctactgccaacaccgtggcccagacagagacgctttccgaggaagaggtacctgtgaggcgcaggacttgcagactggccaggggctgcagggcctctcggctgatggtgcccagctggttcctgctgaggtccagcagtgctagggaggacagccccgctagagcctggtcctccagcagctcaatgctgttttcttgcaggtgaagctcctgcagtcgctgaagtaaggacagcagatcgtgaggaaaaagggcgccgaggttgggggcatgtctctcttcttaccaagctagactgggttgccttttctaactattccagccctacagggcgaggggccataatggagtatcccgcccctttagaccccaggcgctcaccggcaggtgcaagaaggtgaaatccagcagccgcgccagctggttgcccgccaggtagagcacgcgcagctgggccaggcctacgaaggcgccgctgcgcaagccgcgcagccggttgctagtgagcgccagctccagcaggcgcggctgcgcgcggaaggcgccggcctccagggcgcgcaggctgttgttgtgcaggtagagccggcgcagagcggcgagtggcgccagggctcccggctctaggcgggcgatgttgttgtcctgcaggaacagtgtctgcaggccggggaaagaggaggcgcttaccccgctgcgggggtcttcctctccctgggggcaccccgtcctcccgcagctccacacggtgcccacctgcgtccctggcgggattcccagcgggacgacgcgcaaccgcagggcgccacactccaccgtggcgctgtagcagcggcaggctgctgggcagccggcggcgcggagcggcagtagtagcagcagcagcggcagcagttcgggggccctcagggccatctcccgaggcccggttcctcaccggcccttccgcggttcagccgcagacgcgtgccctcctgaaacacaggttggcaggccagtctcggcagtcgagagccagccaatagatggaatggaggcctgcacctgcgtctaacttttgacactataaataggttcaagaaactaataaaacgttctggttttctcctttgac

SEQ ID NO: 140 - DNA, 1194 bp, HUMAN
ttaattcggcggccgcggatccgagccggacgggcactgggcgactctgtgcttcgctgaggaaaaataactaaacatgggcaaaggagatcctaagaagccgagacggaaaatgtcatcatatgcattttttgtgcaaacttgtcgggaggagcataagaagaagcacccagatgcttcagtcaacttctcagagttttctaagaagtgctcagagaggtggaagaccatgtctgctaaagagaaaggaaaatttgaagatatggcaaaagcggacaaggcccgttatgaaagagaaatgaaaacctatatccctcccaaaggggagacaaaaaagaagttcaaggatcccaatgcacccaagaggcctccttcggccttcttcctcttctgctctgagtatcgcccaaaaatcaaaggagaacatcctggcctgtccattggtgatgttgcgaagaaactgggagagatgtggaataacactgctgcagatgacaagcagccttatgaaaagaaggctgaaaagctgaaggaaaaatacgaaaaggatattgctgcatatcgagctaaaggaaagcctgatgcagcaaaaaagggagttgtcaaggctgaaaaaagcaagaaaaagaaggaagaggaggaaggtgaggaagatgaagaggatgaggaggaggaggaagatgaagaagatgaagatgaagaagaagatgatgatgatgaataagttggttctagcgcagttttttttttcttgtctataaagcatttaacccccctgtacacaactcactccttttaaagaaaaaaattgaaatgtaaggctgtgtaagatttgtttttaaactgtacagtgtctttttttgtatagttaacacactaccgaatgtgtctttagatagccctgtcctggtggtatcttcaatagccactaaccctgcctggtacagtatgggggttgtaaattggcatggaaatttaaagcaggttcttgtttgggcacagcacaaattagttatatatggggatggtagttttttcatcttcagttgtctctgatgcagctatacgaaataattgttgttctgttaactgaataccactctgtaattgcaaaaaaaaaaaaaaagttgcagctgttttgttgacattctgaatgcttctaagtaaatacaattttttttattaaaaaaaaaa

SEQ ID NO: 141 - DNA, 2015 bp, HUMAN
gttttctactttgcccgcccacagatgtagttttctctgcgcgtgtgcgttttccctcctcccccgccctcagggtccacggccaccatggcgtattaggggcagcagtgcctgcggcagcattggcctttgcagcggcggcagcagcaccaggctctgcagcggcaacccccagcggcttaagccatggcgtgagtaccggggcgggtcgtccagctgtgctcctggggccggcgcgggttttggattggtggggtgcggcctggggccagggcggtgccgccaagggggaagcgatttaacgagcgcccgggacgcgtggtctttgcttgggtgtccccgagacgctcgcgtgcctgggatcgggaaagcgtagtcgggtgcccggactgcttccccaggagccctacagccctcggaccccgagccccgcaaggtcccaggggtcttggctgttgccccacgaaacgtgcaggaaccaagatggcggcggcagggcggcggcgcgggcgtgagtcaagggcgggcggtgggcggggcgcggccgctggccgtatttggacgtggggacggagcgctttcctcttggcggccggtggaagaatcccctggtctccgtgagcgtccattttgtggaacctgagttgcaagcagggaggggcaaatacaactgccctgttcccgattctctagatggccgatctagagaagtcccgcctcataagtggaaggatgaaattctcagaacagctaacctctaatgggagttggcttctgattctcattcaggcttctcacggcattcagcagcagcgttgctgtaaccgacaaagacaccttcgaattaagcacattcctcgattccagcaaagcaccgcaacatgaccgaaatgagcttcctgagcagcgaggtgttggtgggggacttgatgtcccccttcgacccgtcgggtttgggggctgaagaaagcctaggtctcttagatgattacctggaggtggccaagcacttcaaacctcatgggttctccagcgacaaggctaaggcgggctcctccgaatggctggctgtggatgggttggtcagtccctccaacaacagcaaggaggatgccttctccgggacagattggatgttggagaaaatggatttgaaggagttcgacttggatgccctgttgggtatagatgacctggaaaccatgccagatgaccttctgaccacgttggatgacacttgtgatctctttgcccccctagtccaggagactaataagcagcccccccagacggtgaacccaattggccatctcccagaaagtttaacaaaacccgaccaggttgcccccttcaccttcttacaacctcttcccctttccccaggggtcctgtcctccactccagatcattcctttagtttagagctgggcagtgaagtggatatcactgaaggagataggaagccagactacactgcttacgttgccatgatccctcagtgcataaaggaggaagacaccccttcagataatgatagtggcatctgtatgagcccagagtcctatctggggtctcctcagcacagcccctctaccaggggctctccaaataggagcctcccatctccaggtgttctctgtgggtctgcccgtcccaaaccttacgatcctcctggagagaagatggtagcagcaaaagtaaagggtgagaaactggataagaagctgaaaaaaatggagcaaaacaagacagcagccactaggtaccgccagaagaagagggcggagcaggaggctcttactggtgagtgcaaagagctggaaaagaagaacgaggctctaaaagagagggcggattccctggccaaggagatccagtacctgaaagatttgatagaagaggtccgcaaggcaagggggaagaaaagggtcccctagttgaggatagtcaggagcgtcaatgtgcttgtacatagagtgctgtagctgtgtgttccaataaattattttgtaggg

SEQ ID NO: 142 - DNA, 457 bp, HUMAN
  misc_feature (1)..(457): N=any base
ttttttttttttttttttttacgtttaacctaattttattcatgcttgccttgggatggggaatagatcattcagtaaaaacatacagtaaaaacaaaatgtcttatcatgtacaactttcaaactacaataatgatgtaccttaattacttccatgcacacaagtctaacatttgtttttttaaaaaataaacacaattaagacttctaggagcattttataataaagtaattcctaattaattttnctttgtagatagatcaagcacctccaaaatacaaattcctatacacagtgaggcacgttacttaaaatgaacacttaagtaaattaaggtacgtgggacaggccttaggggtaagctggacattataggtggcggctagggtagggcaacaaaccntaggtggcccantggggaaaagtttttttggcaaattaatttttaaaaactag

SEQ ID NO: 143 - DNA, 393 bp, HUMAN
  misc_feature (1)..(393): N=any base
ttttttttttnttttttttaaggattttaaaaatatatctattttgaaaatattctgaaagtaattaagatcacctattgggaaggaaagaaatcaacacaatgaaatttaggaagagaaatgcaaaagcagctgcagaatcctgccccttccaccccaaggggcacagccggnaggatgaagcttattttaggatcacaagtgcacgctctggtaggacggaggatgactttgtcagtcttctgggctgaagggccttgtccaaagtcaggatcagaaatagggtcagctcatcatgcttgggctttgttgggtcttggtagttaggataagggttcaagggctttntttttccatgaggggagagatttgggacacttcgcagggtttacg

SEQ ID NO: 144 - DNA, 320 bp, HUMAN
  misc_feature (1)..(320): N=any base
gtgttgagttggaagaattggcaaaatatctggaccattaagaaaacggattttgtaactagctttaaactaggccaagcaactagttttcctgcaaatcaaatttttaaagcaacttgggttagactttgtttttgacctaacatcccttccttaaatgccttctgtagtttcagatcagtagggagaccatataataattttatggtacctgtttcaaaacatattttttctgtttttataagtaagttgatattaattaaactcttggcaatatttctnctttcttaaaggaaaatataccttaactttttttcttt

SEQ ID NO: 145 - DNA, 461 bp, HUMAN
  misc_feature (1)..(461): N=any base
atntatnttgggcagggcttgatctggaaagaagtttggaaaccctggggagaaattagttaaaaagaagtggaatcttgatgagctgcctaaatttgagaagaatttttatcaagagcaccctgatttggctaggcgcacagcacaagaggtggaaacatacagaagaagcaaggaaattacagttagaggtcacaactgcccgaagccagttctaaatttttatgaagccaatttccctgcaaatgtcatgggatgttattgcaagacagaattttcactgaaccccactgctatttcaaggctcagggggtgggccagtttgctcttagtggggtttgggtatggggttgggagttggccacagacttggatcnttgggggaaacattgtccttatttttgctttccccgcccatttttccccccatncattcnttcaggcctttccncgggggagag

SEQ ID NO: 146 - DNA, 478 bp, HUMAN
gcctactatgccagatgcctttatggctgaaaccgcaacacccatcaccacttcaatagatcaaagtccagcaggcaaggacggccttcaactgaaaagactcagtgttccctttcctactctcaggatcaagaaagtgttggctaatgaagggaaaggatattttcttccaagcaaaggtgaagagaccaagactctgaaatctcagaattccttttctaactctcccttgctcgctgtaaaatcttggcacagaaacacaatattttgtggctttctttcttttgcccttcacagtgtttcgacagctgattacacagttcctgtcataaggaatgaataattaattatccagagtttagaggaaaaaaatgactaaaaatattattaacttaaaaaatggacaggtgttggatgcccacaggcaaatgcatgggggggttgtttaatgggtgcaaatccctacttgaatgctctt

SEQ ID NO: 147 - DNA, 468 bp, HUMAN
  misc_feature (1)..(468): N=any base
ntnnnttnnaagtctaagtgtttaattattattcacatatttcacagaaaaaaaggaatgtagcaaaggggtcaagattgtagcaaaaaacaaaaaatcctggattttacgggtcactctatttgtacttgggagcagggctgtcccgacatcaggcgcanagctgcacttctccgatgcccctttgcagatgcagccctgggcacacttggcacagcccacaggnagncaggagcagcagctcttcttgcaggaggtgcatttgcctctttgcacttgcaggagctggcgcaggtgcaggagacaccagcggcacaggagcagttgggggtccatttgcaacccgagggcgagactaggagttcccaaggcgagaaggggaaggagggcagtggggttgcacgtnggaagggnttaggggtnccagcacgtggggttngtaccccngggcctngggttcagacaggg

SEQ ID NO: 148 - DNA, 425 bp, HUMAN
  misc_feature (1)..(425): N=any base
ctctcaatgggcgcacgggctacgttctgcagcctgagagcatgaggacagagaaatatgacccgatgccacccgagtcccagaggaagatcctgatgacgctgacagtcaaggttctcggtgctcgccatctccccaaacttggacgaagtattgcctgtncctttgtagaagtggagntctgtggagccgagtatgacaacaacaagttcaagacgacggttgtgaatgataatggcctcagncctatctgggctccaacacaggagaaggtgacatttganatttatgacccaaacctgggnattttttgcgcttngtggtttattgaaggaaggtattgtttcagcgnttccccaattttttttggntcatggccactttacccctttaaaggcagtcaaaatcagggnttcagggtncct

SEQ ID NO: 149 - DNA, 440 bp, HUMAN
  misc_feature (1)..(440): N=any base
actataacttagtgtctgtatttaatattgacaaccaaaaatatatatanttttnttgcatctatacacaacagggcaggagtctccatgtnttcttgagcagtgagtttgcaggctcccacaggccctcttctcatggtaatagtgtggccctagtgcaaaggagactagaacccggcagcccagactggcccttcccctctcctccctgcactccagtgcttcccaactggtctcaggtaaagaaagnttantttgagtggttgggtaggaagagatgggaaggggcaaatcctaatgggagcctgacccctagagtggggagttccagggccagcagaacgggtgggccatagccctncctggggntagaagctttgtagttcatagttcgattagtntgtccntagggcatnaggtnccagccctacagattagct

SEQ ID NO: 150 - DNA, 253 bp, HUMAN
  misc_feature (1)..(253): N=any base
gcttattttagctgcaaagtggcatcatattatnccatttaatgaaattcacctcaagccctttttgacatattaaatatatgggatatatttaaggcaagagaagtaaggcaatccaaatgagtgccctttcccaatctcagcactgtcttggtggaattggtgacactattcagataaccaactggagaccgacaggatttgccatgcatttgcatcttgctagagtttggtttttatgaaagggcctatt

SEQ ID NO: 151 - DNA, 382 bp, HUMAN
  misc_feature (1)..(382): N=any base
ccccaggctggagtgcagtggcatactcatggctcactgacgcctccaattcctaaactccaatgaccttctcacctcagcctgcaagtagctaggattacagatgtgtgccgccatgctaattttnaaaaattttttgtatagatgggtnctcactatgagcccaggctcatcttgaagtnctgggctcaagcaatcctctnaccttggcttcccaaagtactgggattacaggcgggacacncatgccagccgtcactctcatttttgagcacaggaattgtgcccaaaggctaggataaggaattaaagatgcatgccaagaaatacccacaaacattaattataaaaggggagactatacnaatgttttgtggaaaag

SEQ ID NO: 152 - DNA, 408 bp, HUMAN
  misc_feature (1)..(408): N=any base
aaatagaaataacagctaacaggaggtttggagtttcctcatttatgtcttttcctatgaaccttgatttaaagctggacttgcaggaccattgacagaatgttctggcccctcagtgccactcgtgggttcagaaccttcagcctgttcctttgcttcagggagcttttctggggcaccaagtggattaacacagttaggcatcctgctttactttgtccacttcattatcaaattcaattttatcttcttgatgggttgtttttctttacttgtccattctgaggcagggtagggtgctgggcaatgacgtcatatagggaattgatattgctcggaatgtgggaaaccatggcccgggnctaggctttgcgtaggaggctttttaccacttgaaaaatatccant

SEQ ID NO: 153 - DNA, 368 bp, HUMAN
  misc_feature (1)..(368): N=any base
ctcgnccaccacccaatcctcgcctctcttctgctccaccttctctctctgccctcacctctcccccgaaaaccccctatttagccaaaggaaggaggtcaggggaacgctctcccctccccttccaaaaaacaaaaacagaaaaacccttttccaggccggggaaagcaggagggagaggggccgccgggctggccatggagctgctgtgccacgaggtggacccggtccgcaggccttgcgggtaccgcaacctgctccgagacgaccgcgtcctgcagaacctgcttcaccatcgaggagcgnttaccttnccgcagtgnttcctaattncaagttgcgtgnagaaggacatccaaacctnacat

SEQ ID NO: 154 - DNA, 442 bp, HUMAN
  misc_feature (1)..(442): N=any base
cgtttaacaaaattgtttaataaaatttataaaaatgcatctttgagaatacttttctcagcttgaattgttttccttttccacccccaaagaaaatacacaattatcagcacccacacatgtatacactcaaaactacagtgacattctctacacagaactatattcgatatagcttgaactgccgaaaaatcaagacaattccaaaaagtgattgcagggttgatttttttctccaaaacactttgagaaacacgtaaagctatttcaacaaaagtcttttctttgattgtcaaaagttgaaattcacatttaaataaaaagagatccaaatcaagatcctcactnaccccctacccctcaactgaacccccttttagggccacattttcttcttgctcctaagaaaaaaatttggaattttgaatattctcggttttct

SEQ ID NO: 155 - DNA, 1947 bp, HUMAN
tgcagctgcctggctgcctggccctggctgccctgtgtagccttgtgcacagccagcatgtgttcctggctcctcagcaagcacggtcgctgctccagcgggtccggcgagccaacaccttcttggaggaggtgcgcaagggcaacctagagcgagagtgcgtggaggagacgtgcagctacgaggaggccttcgaggctctggagtcctccacggctacggatgtgttctgggccaagtacacagcttgtgagacagcgaggacgcctcgagataagcttgctgcatgtctggaaggtaactgtgctgagggtctgggtacgaactaccgagggcatgtgaacatcacccggtcaggcattgagtgccagctatggaggagtcgctacccacataagcctgaaatcaactccactacccatcctggggccgacctacaggagaatttctgccgcaaccccgacagcagcaacacgggaccctggtgctacactacagaccccaccgtgaggaggcaggaatgcagcatccctgtctgtggccaggatcaagtcactgtagcgatgactccacgctccgaaggctccagtgtgaatctgtcacctccattggagcagtgtgtccctgatcgggggcagcagtaccaggggcgcctggcggtgaccacacatgggctcccctgcctggcctgggccagcgcacaggccaaggccctgagcaagcaccaggacttcaactcagctgtgcagctggtggagaacttctgccgcaacccagacggggatgaggagggcgtgtggtgctatgtggccgggaagcctggcgactttgggtactgcgacctcaactattgtgaggaggccgtggaggaggagacaggagatgggctggatgaggactcagacagggccatcgaagggcgtaccgccacaagtgagtaccagactttcttcaatccgaggacctttggctcgggagaggcagactgtgggctgcgacctctgttcgagaagaagtcgctggaggacaaaaccgaaagagagctcctggaatcctacatcgacgggcgcattgtggagggctcggatgcagagatcggcatgtcaccttggcaggtgatgcttttccggaagagtccccaggagctgctgtgtggggccagcctcatcagtgaccgctgggtcctcaccgccgcccactgcctcctgtacccgccctgggacaagaacttcaccgagaatgaccttctggtgcgcattggcaagcactcccgcaccaggtacgagcgaaacattgaaaagatatccatgttggaaaagatctacatccaccccaggtacaactggcgggagaacctggaccgggacattgccctgatgaagctgaagaagcctgttgccttcagtgactacattcaccctgtgtgtctgcccgacagggagacggcagccagcttgctccaggctggatacaaggggcgggtgacaggctggggcaacctgaaggagacgtggacagccaacgttggtaaggggcagcccagtgtcctgcaggtggtgaacctgcccattgtggagcggccggtctgcaaggactccacccggatccgcatcactgacaacatgttctgtgctggttacaagcctgatgaagggaaacgaggggatgcctgtgaaggtgacagtgggggaccctttgtcatgaagagcccctttaacaaccgctggtatcaaatgggcatcgtctcatggggtgaaggctgtgaccgggatgggaaatatggcttctacacacatgtgttccgcctgaagaagtggatacagaaggtcattgatcagtttggagagtagggggccactcatattctgggctcctggaaccaatcccgtgaaagaattatttttgtgtttctaaaactatggttcccaataaaagtgactctcagcg

SEQ ID NO: 156 - DNA, 4792 bp, HUMAN
ggaccacccagtaccgatcccttcacgaccgtcaccatggaagtgtcaccattgcagcctgtaaatgaaaatatgcaagtcaacaaaataaagaaaaatgaagatgctaagaaaagactgtctgttgaaagaatctatcaaaagaaaacacaattggaacatattttgctccgcccagacacctacattggttctgtggaattagtgacccagcaaatgtgggtttacgatgaagatgttggcattaactatagggaagtcacttttgttcctggtttgtacaaaatctttgatgagattctagttaatgctgcggacaacaaacaaagggacccaaaaatgtcttgtattagagtcacaattgatccggaaaacaatttaattagtatatggaataatggaaaaggtattcctgttgttgaacacaaagttgaaaagatgtatgtcccagctctcatatttggacagctcctaacttctagtaactatgatgatgatgaaaagaaagtgacaggtggtcgaaatggctatggagccaaattgtgtaacatattcagtaccaaatttactgtggaaacagccagtagagaatacaagaaaatgttcaaacagacatggatggataatatgggaagagctggtgagatggaactcaagcccttcaatggagaagattatacatgtatcacctttcagcctgatttgtctaagtttaaaatgcaaagcctggacaaagatattgttgcactaatggtcagaagagcatatgatattgctggatccaccaaagatgtcaaagtctttcttaatggaaataaactgccagtaaaaggatttcgtagttatgtggacatgtatttgaaggacaagttggatgaaactggtaactccttgaaagtaatacatgaacaagtaaaccacaggtgggaagtgtgtttaactatgagtgaaaaaggctttcagcaaattagctttgtcaacagcattgctacatccaagggtggcagacatgttgattatgtagctgatcagattgtgactaaacttgttgatgttgtgaagaagaagaacaagggtggtgttgcagtaaaagcacatcaggtgaaaaatcacatgtggatttttgtaaatgccttaattgaaaacccaacctttgactctcagacaaaagaaaacatgactttacaacccaagagctttggatcaacatgccaattgagtgaaaaatttatcaaagctgccattggctgtggtattgtagaaagcatactaaactgggtgaagtttaaggcccaagtccagttaaacaagaagtgttcagctgtaaaacataatagaatcaagggaattcccaaactcgatgatgccaatgatgcagggggccgaaactccactgagtgtacgcttatcctgactgagggagattcagccaaaactttggctgtttcaggccttggtgtggttgggagagacaaatatggggttttccctcttagaggaaaaatactcaatgttcgagaagcttctcataagcagatcatggaaaatgctgagattaacaatatcatcaagattgtgggtcttcagtacaagaaaaactatgaagatgaagattcattgaagacgcttcgttatgggaagataatgattatgacagatcaggaccaagatggttcccacatcaaaggcttgctgattaattttatccatcacaactggccctctcttctgcgacatcgttttctggaggaatttatcactcccattgtaaaggtatctaaaaacaagcaagaaatggcattttacagccttcctgaatttgaagagtggaagagttctactccaaatcataaaaaatggaaagtcaaatattacaaaggtttgggcaccagcacatcaaaggaagctaaagaatactttgcagatatgaaaagacatcgtatccagttcaaatattctggtcctgaagatgatgctgctatcagcctggcctttagcaaaaaacagatagatgatcgaaaggaatggttaactaatttcatggaggatagaagacaacgaaagttacttgggcttcctgaggattacttgtatggacaaactaccacatatctgacatataatgacttcatcaacaaggaacttatcttgttctcaaattctgataacgagagatctatcccttctatggtggatggtttgaaaccaggtcagagaaaggttttgtttacttgcttcaaacggaatgacaagcgagaagtaaaggttgcccaattagctggatcagtggctgaaatgtcttcttatcatcatggtgagatgtcactaatgatgaccattatcaatttggctcagaattttgtgggtagcaataatctaaacctcttgcagcccattggtcagtttggtaccaggctacatggtggcaaggattctgctagtccacgatacatctttacaatgctcagctctttggctcgattgttatttccaccaaaagatgatcacacgttgaagtttttatatgatgacaaccagcgtgttgagcctgaatggtacattcctattattcccatggtgctgataaatggtgctgaaggaatcggtactgggtggtcctgcaaaatccccaactttgatgtgcgtgaaattgtaaataacatcaggcgtttgatggatggagaagaacctttgccaatgcttccaagttacaagaacttcaagggtactattgaagaactggctccaaatcaatatgtgattagtggtgaagtagctattcttaattctacaaccattgaaatctcagagcttcccgtcagaacatggacccagacatacaaagaacaagttctagaacccatgttgaatggcaccgagaagacacctcctctcataacagactatagggaataccatacagataccactgtgaaatttgttgtgaagatgactgaagaaaaactggcagaggcagagagagttggactacacaaagtcttcaaactccaaactagtctcacatgcaactctatggtgctttttgaccacgtaggctgtttaaagaaatatgacacggtgttggatattctaagagacttttttgaactcagacttaaatattatggattaagaaaagaatggctcctaggaatgcttggtgctgaatctgctaaactgaataatcaggctcgctttatcttagagaaaatagatggcaaaataatcattgaaaataagcctaagaaagaattaattaaagttctgattcagaggggatatgattcggatcctgtgaaggcctggaaagaagcccagcaaaaggttccagatgaagaagaaaatgaagagagtgacaacgaaaaggaaactgaaaagagtgactccgtaacagattctggaccaaccttcaactatcttcttgatatgcccctttggtatttaaccaaggaaaagaaagatgaactctgcaggctaagaaatgaaaaagaacaagagctggacacattaaaaagaaagagtccatcagatttgtggaaagaagacttggctacatttattgaagaattggaggctgttgaagccaaggaaaaacaagatgaacaagtcggacttcctgggaaaggggggaaggccaaggggaaaaaaacacaaatggctgaagttttgccttctccgcgtggtcaaagagtcattccacgaataaccatagaaatgaaagcagaggcagaaaagaaaaataaaaagaaaattaagaatgaaaatactgaaggaagccctcaagaagatggtgtggaactagaaggcctaaaacaaagattagaaaagaaacagaaaagagaaccaggtacaaagacaaagaaacaaactacattggcatttaagccaatcaaaaaaggaaagaagagaaatccctggcctgattcagaatcagataggagcagtgacgaaagtaattttgatgtccctccacgagaaacagagccacggagagcagcaacaaaaacaaaattcacaatggatttggattcagatgaagatttctcagattttgatgaaaaaactgatgatgaagattttgtcccatcagatgctagtccacctaagaccaaaacttccccaaaacttagtaacaaagaactgaaaccacagaaaagtgtcgtgtcagaccttgaagctgatgatgttaagggcagtgtaccactgtcttcaagccctcctgctacacatttcccagatgaaactgaaattacaaacccagttcctaaaaagaatgtgacagtgaagaagacagcagcaaaaagtcagtcttccacctccactaccggtgccaaaaaaagggctgccccaaaaggaactaaaagggatccagctttgaattctggtgtctctcaaaagcctgatcctgccaaaaccaagaatcgccgcaaaaggaagccatccacttctgatgattctgactctaattttgagaaaattgtttcgaaagcagtcacaagcaagaaatccaagggggagagtgatgacttccatatggactttgactcagctgtggctcctcgggcaaaatctgtacgggcaaagaaacctataaagtacctggaagagtcagatgaagatgatctgttttaaaatgtgaggcgattattttaagtaattatcttaccaagcccaagactggttttaaagttacctgaagctcttaacttcctcccctctgaatttagtttggggaaggtgtttttagtacaagacatcaaagtgaagtaaagcccaagtgttctttagcttt

SEQ ID NO: 157 - DNA, 3622 bp, HUMAN
cccggggaggggaccggggaacagagggccgagaggcgtgcggcaggggggagggtaggagaaagaagggcccgactgtaggagggcagcggagcattacctcatcccgtgagcctccgcgggcccagagaagaatcttctagggtggagtctccatggtgacgggcgggcccgcccccctgagagcgacgcgagccaatgggaaggccttggggtgacatcatgggctatttttaggggttgactggtagcagataagtgttgagctcgggctggataagggctcagagttgcactgagtgtggctgaagcagcgaggcgggagtggaggtgcgcggagtcaggcagacagacagacacagccagccagccaggtcggcagtatagtccgaactgcaaatcttattttcttttcaccttctctctaactgcccagagctagcgcctgtggctcccgggctggtggttcgggagtgtccagagagccttgtctccagccggccccgggaggagagccctgctgcccaggcgctgttgacagcggcggaaagcagcggtaccccacgcgcccgccgggggacgtcggcgagcggctgcagcagcaaagaactttcccggcggggaggaccggagacaagtggcagagtcccggagcgaacttttgcaagcctttcctgcgtcttaggcttctccacggcggtaaagaccagaaggcggcggagagccacgcaagagaagaaggacgtgcgctcagcttcgctcgcaccggttgttgaacttgggcgagcgcgagccgcggctgccgggcgccccctccccctagcagcggaggaggggacaagtcgtcggagtccgggcggccaagacccgccgccggccggccactgcagggtccgcactgatccgctccgcggggagagccgctgctctgggaagtgagttcgcctgcggactccgaggaaccgctgcgcccgaagagcgctcagtgagtgaccgcgacttttcaaagccgggtagcgcgcgcgagtcgacaagtaagagtgcgggaggcatcttaattaaccctgcgctccctggagcgagctggtgaggagggcgcagcggggacgacagccagcgggtgcgtgcgctcttagagaaactttccctgtcaaaggctccggggggcgcgggtgtcccccgcttgccagagccctgttgcggccccgaaacttgtgcgcgcacgccaaactaacctcacgtgaagtgacggactgttctatgactgcaaagatggaaacgaccttctatgacgatgccctcaacgcctcgttcctcccgtccgagagcggaccttatggctacagtaaccccaagatcctgaaacagagcatgaccctgaacctggccgacccagtggggagcctgaagccgcacctccgcgccaagaactcggacctcctcacctcgcccgacgtggggctgctcaagctggcgtcgcccgagctggagcgcctgataatccagtccagcaacgggcacatcaccaccacgccgacccccacccagttcctgtgccccaagaacgtgacagatgagcaggaggggttcgccgagggcttcgtgcgcgccctggccgaactgcacagccagaacacgctgcccagcgtcacgtcggcggcgcagccggtcaacggggcaggcatggtggctcccgcggtagcctcggtggcagggggcagcggcagcggcggcttcagcgccagcctgcacagcgagccgccggtctacgcaaacctcagcaacttcaacccaggcgcgctgagcagcggcggcggggcgccctcctacggcgcggccggcctggcctttcccgcgcaaccccagcagcagcagcagccgccgcaccacctgccccagcagatgcccgtgcagcacccgcggctgcaggccctgaaggaggagcctcagacagtgcccgagatgcccggcgagacaccgcccctgtcccccatcgacatggagtcccaggagcggatcaaggcggagaggaagcgcatgaggaaccgcatcgctgcctccaagtgccgaaaaaggaagctggagagaatcgcccggctggaggaaaaagtgaaaaccttgaaagctcagaactcggagctggcgtccacggccaacatgctcagggaacaggtggcacagcttaaacagaaagtcatgaaccacgttaacagtgggtgccaactcatgctaacgcagcagttgcaaacattttgaagagagaccgtcgggggctgaggggcaacgaagaaaaaaaataacacagagagacagacttgagaacttgacaagttgcgacggagagaaaaaagaagtgtccgagaactaaagccaagggtatccaagttggactgggttcggtctgacggcgcccccagtgtgcacgagtgggaaggacttggtcgcgccctcccttggcgtggagccagggagcggccgcctgcgggctgccccgctttgcggacgggctgtccccgcgcgaacggaacgttggactttcgttaacattgaccaagaactgcatggacctaacattcgatctcattcagtattaaaggggggagggggagggggttacaaactgcaatagagactgtagattgcttctgtagtactccttaagaacacaaagcggggggagggttggggaggggcggcaggagggaggtttgtgagagcgaggctgagcctacagatgaactctttctggcctgctttcgttaactgtgtatgtacatatatatattttttaatttgattaaagctgattactgtcaataaacagcttcatgcctttgtaagttatttcttgtttgtttgtttgggtatcctgcccagtgttgtttgtaaataagagatttggagcactctgagtttaccatttgtaataaagtatataatttttttatgttttgtttctgaaaattccagaaaggatatttaagaaaatacaataaactattggaaagtactcccctaacctcttttctgcatcatctgtagatcctagtctatctaggtggagttgaaagagttaagaatgctcgataaaatcactctcagtgcttcttactattaagcagtaaaaactgttctctattagacttagaaataaatgtacctgatgtacctgatgctatgtcaggcttcatactccacgctcccccagcgtatctatatggaattgcttaccaaaggctagtgcgatgtttcaggaggctggaggaaggggggttgcagtggagagggacagcccactgagaagtcaaacatttcaaagtttggattgcatcaagtggcatgtgctgtgaccatttataatgttagaaattttacaataggtgcttattctcaaagcaggaattggtggcagattttacaaaagatgtatccttccaatttggaatcttctctttgacaattcctagataaaaagatggcctttgtcttatgaatatttataacagcattctgtcacaataaatgtattcaaataccaataacagatcttgaattgcttccctttactacttttttgttcccaagttatatactgaagtttttatttttagttgctgaggtt

SEQ ID NO: 158 - DNA, 1596 bp, HUMAN
tgtcggggacggtaaccgggacccgtgctctgctcctgtcgccttcgcctcctgaatccctagccatatgcgtgagtgcatctccatccacgttggccaggctggtgtccagattggcaatgcctgctgggagctctactgcctggaacacggcatccagcccgatggccagatgccaagtgacaagaccattgggggaggagatgactccttcaacaccttcttcagtgagacgggcgctggcaagcacgtgccccgggctgtgtttgtagacttggaacccacagtcattgatgaagttcgcactggcacctaccgccagctcttccaccctgagcagctcatcacaggcaaggaagatgctgccaataactatgcccgagggcactacaccattggcaaggagatcattgaccttgtgttggaccgaattcgcaagctggctgaccagtgcacccgtcttcagggcttcttggttttccacagctttggtgggggaactggttctgggttcacctccctgctcatggaacgcctgtcagttgattatggcaagaaatccaagctggagttctccatttacccggcaccccaggtttccacagctgtagttgagccctacaactccatcctcaccacccacaccaccctggagcactctgattgtgccttcatggtagacaatgaggccatctatgacatctgtcgtagaaacctcgatatcgagcgcccaacctacactaaccttaaccgccttattagccagattgtgtcctccatcactgcttccctgagatttgatggagccctgaatgttgacctgacagaattccagaccaacctggtcccctacccccgcatccacttccctctggccacatatgcccctgtcatctctgctgagaaagcctaccatgaacagctttctgtagcagacatcaccaatgcttgctttgagccagccaaccagatggtgaaatgtgaccctggccatggtaaatacatggcttgctgcctgttgtaccgtggtgacgtggttcccaaagatgtcaatgctgccattgccaccatcaaaaccaagcgcacgatccagtttgtggattggtgccccactggcttcaaggttggcatcaactaccagcctcccactgtggtgcctggtggagacctggccaaggtacagagagctgtgtgcatgctgagcaacaccacagccattgctgaggcctgggctcgcctggaccacaagtttgacctgatgtatgccaagcgtgcctttgttcactggtacgtgggtgaggggatggaggaaggcgagttttcagaggcccgtgaagatatggctgcccttgagaaggattatgaggaggttggtgtggattctgttgaaggagagggtgaggaagaaggagaggaatactaattatccattccttttggccctgcagcatgtcatgctcccagaatttcagcttcagcttaactgacagatgttaaagctttctggttagattgttttcacttggtgatcatgtcttttccatgtgtacctgtaatatttttccatcatatctcaaagtaaagtcattaacatca

SEQ ID NO: 159 - DNA, 1848 bp, HUMAN
aaaggagcaggggcctttggctactttgaggtcacacatgacattaccaaatactccaaggcaaaggtatttgagcatattggaaagaagactcccatcgcagttcggttctccactgttgctggagaatcgggttcagctgacacagttcgggaccctcgtgggtttgcagtgaaattttacacagaagatggtaactgggatctcgttggaaataacacccccattttcttcatcagggatcccatattgtttccatcttttatccacagccaaaagagaaatcctcagacacatctgaaggatccggacatggtctgggacttctggagcctacgtcctgagtctctgcatcaggtttctttcttgttcagtgatcgggggattccagatggacatcgccacatgaatggatatggatcacatactttcaagctggttaatgcaaatggggaggcagtttattgcaaattccattataagactgaccagggcatcaaaaacctttctgttgaagatgcggcgagactttcccaggaagatcctgactatggcatccgggatctttttaacgccattgccacaggaaagtacccctcctggactttttacatccaggtcatgacatttaatcaggcagaaacttttccatttaatccattcgatctcaccaaggtgagtcagtaaacaactatattgttttcttttttaagtctcttcttacctaattagaaaaaaaatctagtcaaacaattataataatggggaagtcatatacaaaatacagagggtaccacttcagagtgtcctaagctgtgaatgagtgcttaccagcatcttacttccacgttcctgtttgtcatttcattgagtatgtgtatgtggcttcatatattgttattaacagggaacagattatgaaaagctgatgtactttttcctggggaaactgtcagtatttaccacttactattgtgaaagatttaactaaggcactcatcttaaattcttatgttttattggatttaaaaattattttcattggcttgattgtatttgaaatctggtatttttgtgggtagctttgatttccttcagttgattgcctggtaattgtgaatatgacatcattttcaggtttggcctcacaaggactaccctctcatcccagttggtaaactggtcttaaaccggaatccagttaattactttgctgaggttgaacagatagccttcgacccaagcaacatgccacctggcattgaggccagtcctgacaaaatgcttcagggccgcctttttgcctatcctgacactcaccgccatcgcctgggacccaattatcttcatatacctgtgaactgtccctaccgtgctcgagtggccaactaccaacgtgacggcccgatgtgcatgcaggacaatcagggtggtgctccaaattactaccccaacagctttggtgctccggaacaacagccttctgccttggagcacagcatccaatattctggagaagtgcggagattcaacactgccaatgatgataacgttactcaggtgcgggcattctatgtgaacgtgctgaatgaggaacagaggaaacgtctgtgtgagaacattgccggccacctgaaggatgcacaaattttcatccagaagaaagcggtcaagaacttcactgaggtccaccctgactacgggagccacatccaggctcttctggacaagtacaatgctgagaagcctaagaatgcgattcacacctttgtgcagtccggatctcacttggcggcaagggagaaggcaaatctgtgaggccggggccctgcacctgtgcatgaagct

SEQ ID NO: 160 - DNA, 1560 bp, HUMAN
atatgtggccaaatcattccttggaatttcccgttggttatgctcatttggaagatagggcctgcactgagctgtggaaacacagtggttgtcaaaccagcagagcaaactcctctcactgctctccacgtggcatctttaataaaagaggcagggtttcctcctggagtagtgaatattgttcctggttatgggcctacagcaggggcagccatttcttctcacatggatatagacaaagtagccttcacaggatcaacagaggttggcaagttgatcaaagaagctgccgggaaaagcaatctgaagagggtgaccctggagcttggaggaaagagcccttgcattgtgttagctgatgccgacttggacaatgctgttgaatttgcacaccatggggtattctaccaccagggccagtgttgtatagccgcatccaggatttttgtggaagaatcaatttatgatgagtttgttcgaaggagtgttgagcgggctaagaagtatatccttggaaatcctctgaccccaggagtcactcaaggccctcagattgacaaggaacaatatgataaaatacttgacctcattgagagtgggaagaaagaaggggccaaactggaatgtggaggaggcccgtgggggaataaaggctactttgtccagcccacagtgttctctaatgttacagatgagatgcgcattgccaaagaggagatttttggaccagtgcagcaaatcatgaagtttaaatctttagatgacgtgatcaaaagagcaaacaatactttctatggcttatcagcaggagtgtttaccaaagacattgataaagccataacaatctcctctgctctgcaggcaggaacagtgtgggtgaattgctatggcgtggtaagtgcccagtgcccctttggtggattcaagatgtctggaaatggaagagaactgggagagtacggtttccatgaatatacagaggtcaaaacagtcacagtgaaaatctctcagaagaactcataaagaaaatacaagagtggagagaagctcttcaatagctaagcatctccttacagtcactaatatagtagattttaaagacaaaatttttcttttcttgattttttttaaacataagctaaatcatattagtattaatactacccatagaaaacttgacatgtagcttcttctgaaagaattatttgccttctgaaatgtgacccccaagtcctatcctaaataaaaaaagacaaattcggatgtatgatctctctagctttgtcatagttatgtgattttcctttgtagctacttttgcaggataataattttatagaaaaggaacagttgcatttagcttctttcccttagtgactcttgaagtacttaacatacacgttaactgcagagtaaattgctctgttcccagtagttataaagtccttggactgttttgaaaagtttcctaggatgtcatgtctgcttgtcaaaagaaataatccctgtaatatttagctgtaaactgaatataaagcttaataaaaacaaccttgcata

SEQ ID NO: 161 - DNA, 1987 bp, HUMAN
ctcgagagctccgccatggccgctctcacccgggacccccagttccagaagctgcagcaatggtaccgcgagcaccgctccgagctgaacctgcgccgcctcttcgatgccaacaaggaccgcttcaaccacttcagcttgaccctcaacaccaaccatgggcatatcctggtggattactccaagaacctggtgacggaggacgtgatgcggatgctggtggacttggccaagtccaggggcgtggaggccgcccgggagcggatgttcaatggtgagaagatcaactacaccgagggtcgagccgtgctgcacgtggctctgcggaaccggtcaaacacacccatcctggtagacggcaaggatgtgatgccagaggtcaacaaggttctggacaagatgaagtctttctgccagcgtgtccggagcggtgactggaaggggtacacaggcaagaccatcacggacgtcatcaacattggcattgtcggctccgacctgggacccctcatggtgactgaagcccttaagccatactcttcaggaggtccccgcgtctggtatgtctccaacattgatggaactcacattgccaaaaccctggcccagctgaacccggagtcctccctgttcatcattgcctccaagacctttactacccaggagaccatcacgaatgcagagacggcgaaggagtggtttctccaggcggccaaggatccttctgcagtggcgaagcactttgttgccctgtctactaacacaaccaaagtgaaggagtttggaattgaccctcaaaacatgttcgagttctgggattgggtgggaggacgctactcgctgtggtcggccatcggactctccattgccctgcacgtgggttttgacaacttcgagcagctgctctcgggggctcactggatggaccagcacttccgcacgacgcccctggagaagaacgcccccgtcttgctggccctgctgggtatctggtacatcaactgctttgggtgtgagacacacgccatgctgccctatgaccagtacctgcaccgctttgctgcgtacttccagcagggcgacatggagtccaatgggaaatacatcaccaaatctggaacccgtgtggaccaccagacaggccccattgtgtggggggagccagggaccaatggccagcatgctttttaccagctcatccaccaaggcaccaagatgataccctgtgacttcctcatcccggtccagacccagcaccccatacggaagggtctgcatcacaagatcctcctggccaacttcttggcccagacagaggccctgatgaggggaaaatcgacggaggaggcccgaaaggagctccaggctgcgggcaagagtccagaggaccttgagaggctgctgccacataaggtctttgaaggaaatcgcccaaccaactctattgtgttcaccaagctcacaccattcatgcttggagccttggtcgccatgtatgagcacaagatcttcgttcagggcatcatctgggacatcaacagctttgaccagtggggagtggagctgggaaagcagctggctaagaaaatagagcctgagcttgatggcagtgctcaagtgacctctcacgacgcttctaccaatgggctcatcaacttcatcaagcagcagcgcgaggccagagtccaataaactcgtgctcatctgcagcctcctctgtgactcccctttctcttctcgtccctcctccccggagccggcactgcatgttcctggacaccacccagagcaccctctggttgtgggcttggaccacgagcccttagcagggaaggctggtctcccccagcctaacccccagcccctccatgtctatgctccctctgtgttagaattggctgaagtgtttttgtgcagctgacttttctgacccatgttcacgttgttcacatcccatgtagaaaaacaaagatgccacggaggaggt

SEQ ID NO: 162 - DNA, 1662 bp, HUMAN
caagagctccagcaaagactttcactgtagcttgacttgacctgagattaactagggaatcttgagaataaagatgagctctgaaaattgtttcgtagcagagaacagctctttgcatccggagagtggacaagaaaatgatgccaccagtccccatttctcaacacgtcatgaagggtccttccaagttcctgtcctgtgtgctgtaatgaatgtggtcttcatcaccattttaatcatagctctcattgccttatcagtgggccaatacaattgtccaggccaatacacattctcaatgccatcagacagccatgtttcttcatgctctgaggactgggttggctaccagaggaaatgctactttatttctactgtgaagaggagctggacttcagcccaaaatgcttgttctgaacatggtgctactcttgctgtcattgattctgaaaaggacatgaactttctaaaacgatacgcaggtagagaggaacactgggttggactgaaaaaggaacctggtcacccatggaagtggtcaaatggcaaagaatttaacaactggttcaacgttacagggtctgacaagtgtgtttttctgaaaaacacagaggtcagcagcatggaatgtgagaagaatttatactggatatgtaacaaaccttacaaataataaggaaacgtgttcacttattgactattatagaatggaactcaaggaaatctgtgtcagtggatgctgctctgtggtccgaagtcttccatagagactttgtgaaaaaaaattttatagtgtcttgggaattttcttccaaacagaactatggaaaaaaaggaagaaattccaggaaaatctgcacttgtggcttttattgccatgagctagaagcatcacaggttgaccaataaccatgcccaagaatgagaagaatgactatgcaacctttggatgcactttatattattttgaatccagaaataatgaaataactaggcgtggacttactattaattgctgaatgactaccaacagtgagagcccttcatgcatttgcactattggaaggagttagatgttggtactagatactgaatgtaaacaaaggaattatggctggtaacatagtttttagtctaattgaatcccttaaactcagggagcatttataaatggcaaatgcttatgaaactaagatttgtaatatttctctctttttagagaaatttgccaatttactttgttatttttccccaaaaagaatgggatgatcgtgtatttatttttttacttcctcagctgtagacaggtccttttcgatggtacatatttctttgcctttataatcttttatacagtgtcttacagagaaaagacataagcaaagactatgaggaatatttgcaagacatagaatagtgttggaaaatgtgcaatatgtgatgtggcaaatctctattaggaaatattctgtaatcttcagacctagaataatactagtcttataataggtttgtgactttcctaaatcaattctattacgtgcaatacttcaatacttcatttaaaatatttttatgtgcaataaaatgtatttgtttgtattttgtgttcagtacaattataagctgtttttatatatgtgaaataaaagtagaataaac

SEQ ID NO: 163 - DNA, 398 bp, HUMAN
gatgctggggctggtcctggccttgctgtcctccagctctgctgaggagtacgtgggcctgtctgcaaaccagtgtgccgtgccggccaaggacagggtggactgcggctacccccatgtcacccccaaggagtgcaacaaccggggctgctgctttgactccaggatccctggagtgccttggtgtttcaagcccctgactaggaagacagaatgcaccttctgaggcacctccagctgcccctgggatgcaggctgagcacccttgcccggctgtgattgctgccaggcactgttcatctcagtttttctgtccctttgctcccggcaagctttctgctgaaagttcatatctggagcctgatgtcttaacgaataaaggtcccatgctccacccg

SEQ ID NO: 164 - DNA, 1644 bp, HUMAN
ggcgagatggcggccaccgagggggtcggggaggctgcgcaagggggcgagcccgggcagccggcgcaacccccgccccagccgcacccaccgccgccccagcagcagcacaaggaagagatggcggccgaggctggggaagccgtggcgtcccccatggacgacgggtttgtgagcctggactcgccctcctatgtcctgtacagggacagagcagaatgggctgatatagatccggtgccgcagaatgatggccccaatcccgtggtccagatcatttatagtgacaaatttagagatgtttatgattacttccgagctgtcctgcagcgtgatgaaagaagtgaacgagcttttaagctaacccgggatgctattgagttaaatgcagccaattatacagtgtggcatttccggagagttcttttgaagtcacttcagaaggatctacatgaggaaatgaactacatcactgcaataattgaggagcagcccaaaaactatcaagtttggcatcataggcgagtattagtggaatggctaagagatccatctcaggagcttgaatttattgctgatattcttaatcaggatgcaaagaattatcatgcctggcagcatcgacaatgggttattcaggaatttaaactttgggataatgagctgcagtatgtggaccaacttctgaaagaggatgtgagaaataactctgtctggaaccaaagatacttcgttatttctaacaccactggctacaatgatcgtgctgtattggagagagaagtccaatacactctggaaatgattaaactagtaccacataatgaaagtgcatggaactatttgaaagggattttgcaggatcgtggtctttccaaatatcctaatctgttaaatcaattacttgatttacaaccaagtcatagttccccctacctaattgcctttcttgtggatatctatgaagacatgctagaaaatcagtgtgacaataaggaagacattcttaataaagcattagagttatgtgaaatcctagctaaagaaaaggacactataagaaaggaatattggagatacattggaagatcccttcaaagcaaacacagcacagaaaatgactcaccaacaaatgtacagcaataacaccatccagaagaacttgatggaatgcttttattttttattaagggaccctgcaggagtttcacacgagagtggtccttccctttgcctgtggtgtaaaagtgcatcacacaggtattgctttttaacaagaactgatgctccttgggtgctgctgctactcagactagctctaagtaatgtgattcttctaaagcaaagtcattggatgggaggaggaagaaaaagtcccataaaggaacttttgtagtcttatcaacatataatctaatcccttagcatcagctcctccctcagtggtacatgcgtcaagatttgtagcagtaataactgcaggtcacttgtatgtaatggatgtgaggtagccgaagtttggttcagtaagcagggaatacagtcgttccatcagagctggtctgcacactcacattatcttgctatcactgtaaccaactaatgccaaaagaacggttttgtaataaaattatagctgtatct

SEQ ID NO: 165 - DNA, 6305 bp, HUMAN
gaattcctgggctcagaggtcctcccaccttagccttctgagtagctaggactacagacaccagctaccacatgaggctttgtagaaatggggtcttactatgttgcccaggctgattttgaactcctggtctcaagcaatctttccaccttagccttccaaagtgctggaattacaggagtgggccactgcacctggctctattaacattttttatttgctttatcacatatttatcaatccatctcacttttaaatatcttttaaaattacaaatatcagtacattttacatctaaacccttcagaagcttaacattgactggagttcagtatttatttccccatttcttttctggcctgaggaaggcaaattttacatacaaatctcaagtcagtactcttttttttttttgagacggagtcttgctctgttgcccaggctggagtccagtggtgtgatcttggctcactgcaacctctgccttctgggtacaagcgattctcctgtctcagcctcccaagtagctgggactacaggtttgtgccaccatatccagctaatttttgtatttttaatggagaaggggtttcaccatgttggccaggctggtctcaaactcttgacctcaagtgatccacctgccttggtctcctaaagtgctgggattataggtgtgagccatctcgcctggcctaatactgttttgtttgtttgtttttgtttttaagacagagtcttgttcttgtcacccaggctggagtgcaatggcatgatttcggctcactgcaacttccgcctcctgggttcaagtgattctcctgcctcagcctcccaagtagctggaattaaaggtgcctaccaccacgccccgctaatttttatatttttagtagagatggggtttcaccatgttgatcaggctgctctcgagctccttacctcagatgatccaccttccttggcctcccaaagtgctggtattataggcaagagccactgcgcccagccccagtattcagtttttaaactgtcttgttatcaaggctctggagccagatgcctgggttcaaattctggttctgccactgactctgtgagctccataagtttcttaacctctctgtacctcagtttcctcttagggtttttgtcaggattataattattggctgggcatgatggctcatgcttgtaatcccagcactttaggaggccaacacgggcagatcacgtgagtccaggagtttgagcccagcctgggcaatgtggcaaaaatccatctctacaaaaaatgcaaaaattagctgggcatggtggcatgtgcctatagtcccagctattcaggaggctgaggtaggtgaatccatagatcctgggaggtcaaggctgcagtgagccatgatcctgccattgcattccagtctgggtgacatagcgagaccctgtctcaaaaaaaaaaattattaaagtgtgtaaatcagtggcataaacatgttaagtgcattttgtgggtcagctatattattattagtattacggaaacacatagagatgttaccaagaaggggagatgattggagccacttccagcttccttggacctggtctttcttcccttgactctttttttttttttttttttttttttgagagagagagtctcagcctgttgcccaggctggagtgcaatggtgcaatcttggctcactgcaacctctgcctcccaggtttaagtgattctcctgcctcagcctcctgtgtagctggaattacaggcgcgtgccaccacgcccggctaactttttgtatctttagtagagacagggtttcaccatgttggccaggctggtctcgaactcctgacctcaagtgatccacctgcctcagcctcccaaagtgttgggattacaggtgtaagccactaccccggctactcccttgactcttaaccactcatgctgcctacatctaccattcatgtggtccttgctgctttgttttggttattcctgcatttatttgtccttttattcatttatgtataaacatttagtaagcacctactaatggatagggctcattgtagacttggaagctctctgagggtgggagtatgcctcgtccatctgtctttactttttgtagcaagggaggtaaagctccatttccatccctccttagtgagtcagtagtcagtggtgaggctaaggcttacctctccctttctcactcagcacagggggctggagatgagcaagggaacgggaggaggtcagcccagtatgggaatcagttcttctcagggaacccagacatccatccctcaagattccagtccttgtcctagtccggcccttgacctcagagacgggatcagctcttcctccagcacctaccttgagggtatagaagaatgcaaaccacattggaaacctggagatctgtgttctcatttcagctctgctgactggcttcctgcaagctaccttccctccctgggcctcagtttctctctctgctgagccagaagatgtctaaagacccctttggttccaccctgagagcctgtctccctaacctcaacttcttccccagttcagagaacccaggcatccagctgccccaccccagctctgggtaaacaggaagctgggtgaggggagcaggggtgtgcggaaagtcccagccaggtgtgcaggtctacagggagggggtgggcccgtccctgaggtatgaaagccccctgctctggctctggttcagtctcaatgggggcactggggctggagggcaggggtgggaggctccaggggaggggttccctcctgctagctgtggcaggagccacttctctggtgaccttgttgctggcggtgcctatcactgtcctggctgtgctggccttagtgccccaggatcagggaggactggtgagtggctgcaacaggccctggtggagagttgtatcttgcggatgcttggctccctctggttgtgcctgtggtcttttgccccctctggctcagctggctcggctgtccctggtggggatgtcttgtctctttgctgactctctttccatgttcctgtgatgttgtgcttgtgtcccgacataagccccttgtgtctcctctcctcttcccgaggtacatctgtttctccgcccaagtacctatgccttgcttgttctcccttctaaggaggtgtgtgttggggatggtgctggtaggagaaaccccaggcctgcagcttgggtccactttcagaggggtaggggtgacatgagctgaatctgaactctgggcactgtgaccccacccaaccaggtaacggagacggccgaccccggggcacaggcccagcaaggactgggtaagagcagactgtctctccttccccgcttcagaccctcaggggctcccagctccctgctgcgtccccagatacctcttcctctaggaatccaggctccccatccctgcgccctgttctctcaagggtagcctgcatgggtggctgccctgcccccaatcgtggactctttgccccttccagggtttcagaagctgccagaggaggagccagaaacagatctcagccccgggctcccagctgcccacctcataggtaaggacctccaagacctgaataagagtgtaaataatccgaaggttccagttctgctcgcccagagtccttcggctccatgattccagtgctcggtttcccacccgcttcacgaccttttgtcgctcgtgcccactcttacgctcgtccccgcagtgtagtttcttcttccctccggtgcaagcaaaagccggcctggaggtccccactacagcgttctgcaccccacatccgtgttccctcggcccccaactcgcactcatcccagaaacagcaccatccctcctcccccggcccggctcggctcccgcaggggctaaaagccgccacttccccagaagtcccaagcctttaggatcgcattcccaagagcgcgtcggcccgtgtctccgcaggcgctccgctgaaggggcaggggctaggctgggagacgacgaaggaacaggcgtttctgacgagcgggacgcagttctcggacgccgaggggctggcgctcccgcaggacggcctctattacctctactgtctcgtcggctaccggggccgggcgccccctggcggcggggacccccagggccgctcggtcacgctgcgcagctctctgtaccgggcggggggcgcctacgggccgggcactcccgagctgctgctcgagggcgccgagacggtgactccagtgctggacccggccaggagacaagggtacgggcctctctggtacacgagcgtggggttcggcggcctggtgcagctccggaggggcgagagggtgtacgtcaacatcagtcaccccgatatggtggacttcgcgagagggaagaccttctttggggccgtgatggtggggtgagggaatatgagtgcgtggtgcgagtgcgtgaatattgggggcccggacgcccaggaccccatggcagtgggaaaaatgtaggagactgtttggaaattgattttgaacctgatgaaaataaagaatggaaagcttcagtgctgccgataaagatgctgagttgcgacacacgtcttaattcagggtgggtgcacgggtgcgggttaaatattctcagtactcttctggttgcttgaaacaattcatcacaacacagtgtatggcctttgctcctagggatgatggtctgcctgtcccaccccctccctgcctctgaatggccaggccccaccattagcccagttggagggtgggaggaagggggacttctcaaactccgaagcttctctaggcatcctgattttcagggccacatggtcccaaccagactctgcaccatactcttttctcttgggtaccccccaacagtgagaggggtcattacagagcccagcaagcaccactcagaaaggcccagcagcagagtaagcccctatcatgacagaggaatgaagcctggaggggccccgcacttctccccctagagctgcctgaaggcctctctgtctcctacccgacagtcaactcttctcctccaaggagcttaattcaaggctcatggggtctgaagggaggaggctgaaggagaaagaaggggagaatattagagagagatggggatggcaggaaggagcctgtggtgcctgaaaacaccaggaagttctggggaggaggaaaaaccgatgccccacttagggtgtcccatttagggtgagacggaaaatcctcacctttttttcacactttaggtcccccttcccaaaagtgagtaagtgtgggtgcttctgggatgagtaacagtgtcccccattacttcatggctgactttcagccacaggctggaggaggcagagggtgacccaaggccctatctaggtcaccccaatgggtcaccctaccccctcagcctaccacatggttttctcctgcctggcaccccagggctggaggtaaagcctaatttccgaactcagtgggggctcccagtctaggggggctcaatttccgtctccatatttgtttttggaattattatttttttgagacagggtctcgttctgtcacccagacgggggtacagtggcatgatcatagcttactgtaacctcaaactcctgggcttgagtgatcctcctgcctcagcctcctgaggagctaggattacaggcatgcaccactacacctgactaatctttaattttttttctagaaacaaggtcttgctatgttgcacaggctggtcttgaactagtgggctcaagtggtcctcccacctcagcctcccaaagtgttgggataacaggcatgagccactgcgccccacccttatttgtctttgactctctccagaagagccttcatccagggagggggtgcttttctctttccggattacccacctctcacctctcccctccttcaccacaaagaccagtgggaccaagccggcatgtgagtccttcacccacatcttattcctatgtttcattcttttttaaaaaatagagacaggatctcactatgttgcccaggttgctctggaactcctgggttcaagcgatcctctcaccttggccttgcaaagtggtaggattacaggtgcatgccaccacgtccggcagttcggttccttgttctttattgtcctcagtctcttcgatttcacccactgagagaatggaaggggatagaacagctggaaactggttgaaggaagccagaattc

SEQ ID NO: 166 - DNA, 3702 bp, HUMAN
aattagagtagaagttgtcggggtccgctcttaggacgcagccgcctcatgggggtccaggggctctggaagctgctggagtgctccgggcggcaggtcagccccgaagcgctggaagggaagatcctggctgttgatattagcatttggttaaaccaagcacttaaaggagtccgggatcgccacgggaactcaatagaaaatcctcatcttctcactttgtttcatcggctctgcaaactcttattttttcgaattcgtcctatttttgtgtttgatggggatgctccactattgaagaaacagactttggtgaagagaaggcagagaaaggacttagcgtccagtgactccaggaaaacgacagagaagcttctgaaaacatttttgaaaagacaagccatcaaaactgccttcagaagcaaaagagatgaagcactacccagtcttacccaagttcgaagagaaaacgacctctatgttttgcctcctttacaagaggaagaaaaacacagttcagaagaggaagatgaaaaagaatggcaagaaagaatgaatcaaaaacaagcattacaggaagagttctttcataatcctcaagcgatagatattgagtctgaggacttcagcagcctgccccctgaagtaaagcatgaaatcttgactgatatgaaagagttcaccaagcgcagaagaacattatttgaagcaatgccagaggagtctgatgacttttcacagtaccaactcaaaggcttgcttaaaaagaactatctgaaccagcatatagaacatgtccaaaaggaagtgaatcagcaacattcaggacacatccgaaggcagtatgaagatgaagggggctttctgaaggaggtagagtcaaggagagtggtctctgaagacacttcacattacatcttgataaaaggtattcaagctaagacagttgcagaagtggattcagagtctcttccttcttccagcaaaatgcacggcatgtcttttgacgtgaagtcatctccatgtgaaaaactgaagacagagaaagagcctgatgctacccctccttctccaagaactttactagctatgcaagctgccctgctgggaagtagctcagaagaggagctggagagtgaaaatcgaaggcaggcccgtgggaggaacgcacctgctgctgtagacgaaggctccatatcaccccggactctttcagccattaagagagctcttgacgatgacgaagatgtaaaagtgtgtgctggggatgatgtgcagacgggagggccaggagcagaagaaatgcgtataaacagctccaccgagaacagtgatgaaggacttaaagtgagagatggaaaaggaataccgtttactgcaacacttgcgtcatctagtgtgaactctgcagaggagcacgtagccagcactaatgaggggagagagcccacagactcagttccaaaagaacaaatgtcacttgttcacgtggggactgaagcctttccgataagtgatgagtctatgattaaggacagaaaagatcggctgcctctggagagtgcagtggttagacatagtgacgcacctgggctcccgaatggaagggaactgacaccggcatctccaacttgtacaaattctgtgtcaaagaatgaaacacatgctgaagtgcttgagcagcagaacgaactttgcccatatgagagtaaattcgattcttctcttctttcaagtgatgatgaaacaaaatgtaaaccgaattctgcttctgaagtcattggccctgtcagtttgcaagaaacaagtagcatagtaagtgtcccttcagaggcagtagataatgtggaaaatgtggtgtcatttaatgctaaagagcatgagaattttctggaaaccatccaagaacagcagaccactgaatctgcaggccaggatttaatttccattccaaaggccgtggaaccaatggaaattgactcggaagaaagtgaatctgatggaagtttcattgaagtgcaaagtgtgattagtgatgaggaacttcaagcagaattccctgaaacttccaaacctccctcagaacaaggcgaagaggaactggtaggaactagggagggagaagcccctgctgagtccgagagcctcctgagggacaactctgagagggacgacgtggatggtgagccacaggaagctgagaaagatgcggaagattcgctccatgaatggcaagatattaatttggaggagttggaaactctggagagcaacctcttagcacagcagaattcactgaaagctcaaaaacagcagcaagaacggatcgctgctactgtcaccggacagatgttcctggaaagccaggaactcctgcgcctgttcggcattccctacatccaggctcccatggaagcagaggcgcagtgcgccatcctggacctgactgatcagacttccggaaccatcactgatgacagtgatatctggctgtttggagcgcggcatgtctatagaaacttttttaataaaaataagtttgtagaatattatcaatatgtggactttcacaatcaattgggattggaccggaataagttaataaatttggcttatttgcttggaagtgattataccgaaggaataccaactgtgggttgtgtaaccgccatggaaattctcaatgaattccctgggcatggcctggaacctctcctaaaattctcagaatggtggcatgaagctcaaaaaaatccaaagataagacctaatcctcatgacaccaaagtgaaaaaaaaattacggacattgcaactcacccctggctttcctaacccagctgttgccgaggcctacctcaaacccgtggtggatgactcgaagggatcctttctgtgggggaaacctgatctcgacaaaattagagaattttgtcagcggtatttcggctggaacagaacgaagacagatgaatctctgtttcctgtattaaagcaactcgatgcccagcagacacagctccgaattgattccttctttagattagcacaacaggagaaagaagatgctaaacgtattaagagccagagactaaacagagctgtgacatgtatgctaaggaaagagaaagaagcagcagccagcgaaatagaagcagtttctgttgccatggagaaagaatttgagctacttgataaggcaaaacgaaaaacccagaagagaggcataacaaataccttagaagagtcatcaagcctgaaaagaaagaggctttcagattctaaacgaaagaatacatgcggtggatttttgggggagacctgcctctcagaatcatctgatggatcttcaagtgaagatgctgaaagttcatctttaatgaatgtacaaaggagaacagctgcgaaagagccaaaaaccagtgcttcagattcgcagaactcagtgaaggaagctcccgtgaagaatggaggtgcgaccaccagcagctctagtgatagtgatgacgatggagggaaagagaagatggtcctcgtgaccgccagatctgtgtttgggaagaaaagaaggaaactaagacgtgcgaggggaagaaaaaggaaaacctaattaaaaaatatgtatcctctataattagttatgacagccatttgtaatgaatttgtcgcaaagacgtaataaaattaactggtagcacggtca

SEQ ID NO: 167 - DNA, 1374 bp, HUMAN
attgcggcggcgccagagctgctggagcgctcggggtccccgggcggcggcggcggcgcagaggaggaggcaggcggcggccccggtggctcccccccggacggtgcgcggcccggcccgtctcgcgaactcgcggtggtcgcgcggccccgcgctgctccgaccccgggcccctccgccgccgccatggctcggccgctagtgcccagctcgcagaaggcgctgctgctggagctcaaggggctgcaggaagagccggtcgagggattccgcgtgacactggtggacgagggcgatctatacaactgggaggtggccattttcgggccccccaacacctactacgagggcggctacttcaaggcgcgcctcaagttccccatcgactacccatactctccaccagcctttcggttcctgaccaagatgtggcaccctaacatctacgagacgggggacgtgtgtatctccatcctccacccgccggtggacgacccccagagcggggagctgccctcagagaggtggaaccccacgcagaacgtcaggaccattctcctgagtgtgatctccctcctgaacgagcccaacaccttctcgcccgcaaacgtggacgcctccgtgatgtacaggaagtggaaagagagcaaggggaaggatcgggagtacacagacatcatccggaagcaggtcctggggaccaaggtggacgcggagcgtgacggcgtgaaggtgcccaccacgctggccgagtactgcgtgaagaccaaggcgccggcgcccgacgagggctcagacctcttctacgacgactactacgaggacggcgaggtggaggaggaggccgacagctgcttcggggacgatgaggatgactctggcacggaggagtcctgacaccaccagaataaacttgccgagtttacctcactagggccggacccgtggctccttagacgacagactacctcacggaggttttgtgctggtccccgtctcctctggttgtttcgttttggctttttctccctccccatgtctgttctgggttttcacgtgcttcagagaagaggggctgccccaccgccactcacgtcactcggggctcggtggacgggcccagggtgggagcggccggcccacctgtcccctcgggaggggagctgagcccgacttctaccggggtcccccagcttccggactggccgcaccccggaggagccacgggggcgctgctgggaacgtgggcggggggccgtttcctgacactaccagcctgggaggcccaggtgtagcggtccgaggggcccggtcctgcctgtcagctccaggtcctggagccacgtccagcactgagtggacggattcaccaat

SEQ ID NO: 168 - DNA, 357 bp, HUMAN
atggacgtgttcctcatgatccggcgccacaagaccaccatcttcacggacgccaaggagtccagcacggtgttcgaactgaagcgcatcgtcgagggcatcctcaagcggcctcctgacgagcagcggctgtacaaggatgaccaactcttggatgatggcaagacactgggcgagtgtggcttcaccagtcaaacagcacggccacaggccccagccacagtggggctggccttccgggcagatgacacctttgaggccctgtgcatcgagccgttttccagcccgccagagctgcccgatgtgatgaagccccaggactcgggaagcagtgccaatgaacaagccgtgcagtga

SEQ ID NO: 169 - DNA, 1309 bp, HUMAN
gccagggttgcctgcgggagccaggcgtccgctctccacacctttcacagccccagccctcagagcaacctcagcccagcccagcccagctccagctccagctccagcccgggccccatcatggccaaggactttcaagatatccagcagctgagctcggaggaaaatgaccatcctttccatcaaggtgaggggccaggcactcgcaggctgaatcccaggagaggaaatccatttttgaaagggccacctcctgcccagcccctggcacagcgtctctgctccatggtctgcttcagtctgcttgccctgagcttcaacatcctgctgctggtggtcatctgtgtgactgggtcccaaagtgagggtcacagaggtgcacagctgcaagccgagctgcggagcctgaaggaagctttcagcaacttctcctcgagcaccctgacggaggtccaggcaatcagcacccacggaggcagcgtgggtgacaagatcacatccctaggagccaagctggagaaacagcagcaggacctgaaagcagatcacgatgccctgctcttccatctgaagcacttccccgtggacctgcgcttcgtggcctgccagatggagctcctccacagcaacggctcccaaaggacctgctgccccgtcaactgggtggagcaccaaggcagctgctactggttctctcactccgggaaggcctgggctgaggcggagaagtactgccagctggagaacgcacacctggtggtcatcaactcctgggaggagcagaaattcattgtacaacacacgaaccccttcaatacctggataggtctcacggacagtgatggctcttggaaatgggtggatggcacagactataggcacaactacaagaactgggctgtcactcagccagataattggcacgggcacgagctgggtggaagtgaagactgtgttgaagtccagccggatggccgctggaacgatgacttctgcctgcaggtgtaccgctgggtgtgtgagaaaaggcggaatgccaccggcgaggtggcctgaccccagcacacctctggctaacccataccccacacctgcccagctctggcttctctgttgaggattttgaggaaaggaagaaacactgagacaggggtatggggaagagctgagcaaagagagaaaggaggtagtttaagagtccctgaccctggaggactgagatcccacctccttctgtaattcattgtaattattataatcgtcagcctcttcaatggcgtaggaaagaagaaacaaatgcttgaatctc

SEQ ID NO: 170 - DNA, 6030 bp, HUMAN
gttggcccccgttacttttcctctgggaaatatggcgcacgctgggagaacagggtacgataaccgggagatagtgatgaagtacatccattataagctgtcgcagaggggctacgagtgggatgcgggagatgtgggcgccgcgcccccgggggccgcccccgcgccgggcatcttctcctcgcagcccgggcacacgccccatacagccgcatcccgggacccggtcgccaggacctcgccgctgcagaccccggctgcccccggcgccgccgcggggcctgcgctcagcccggtgccacctgtggtccacctgaccctccgccaggccggcgacgacttctcccgccgctaccgccgcgacttcgccgagatgtccaggcagctgcacctgacgcccttcaccgcgcggggacgctttgccacggtggtggaggagctcttcagggacggggtgaactgggggaggattgtggccttctttgagttcggtggggtcatgtgtgtggagagcgtcaaccgggagatgtcgcccctggtggacaacatcgccctgtggatgactgagtacctgaaccggcacctgcacacctggatccaggataacggaggctgggatgcctttgtggaactgtacggccccagcatgcggcctctgtttgatttctcctggctgtctctgaagactctgctcagtttggccctggtgggagcttgcatcaccctgggtgcctatctgggccacaagtgaagtcaacatgcctgccccaaacaaatatgcaaaaggttcactaaagcagtagaaataatatgcattgtcagtgatgttccatgaaacaaagctgcaggctgtttaagaaaaaataacacacatataaacatcacacacacagacagacacacacacacacaacaattaacagtcttcaggcaaaacgtcgaatcagctatttactgccaaagggaaatatcatttattttttacattattaagaaaaaaagatttatttatttaagacagtcccatcaaaactcctgtctttggaaatccgaccactaattgccaagcaccgcttcgtgtggctccacctggatgttctgtgcctgtaaacatagattcgctttccatgttgttggccggatcaccatctgaagagcagacggatggaaaaaggacctgatcattggggaagctggctttctggctgctggaggctggggagaaggtgttcattcacttgcatttctttgccctgggggctgtgatattaacagagggagggttcctgtggggggaagtccatgcctccctggcctgaagaagagactctttgcatatgactcacatgatgcatacctggtgggaggaaaagagttgggaacttcagatggacctagtacccactgagatttccacgccgaaggacagcgatgggaaaaatgcccttaaatcataggaaagtatttttttaagctaccaattgtgccgagaaaagcattttagcaatttatacaatatcatccagtaccttaagccctgattgtgtatattcatatattttggatacgcaccccccaactcccaatactggctctgtctgagtaagaaacagaatcctctggaacttgaggaagtgaacatttcggtgacttccgcatcaggaaggctagagttacccagagcatcaggccgccacaagtgcctgcttttaggagaccgaagtccgcagaacctgcctgtgtcccagcttggaggcctggtcctggaactgagccggggccctcactggcctcctccagggatgatcaacagggcagtgtggtctccgaatgtctggaagctgatggagctcagaattccactgtcaagaaagagcagtagaggggtgtggctgggcctgtcaccctggggccctccaggtaggcccgttttcacgtggagcatgggagccacgacccttcttaagacatgtatcactgtagagggaaggaacagaggccctgggcccttcctatcagaaggacatggtgaaggctgggaacgtgaggagaggcaatggccacggcccattttggctgtagcacatggcacgttggctgtgtggccttggcccacctgtgagtttaaagcaaggctttaaatgactttggagagggtcacaaatcctaaaagaagcattgaagtgaggtgtcatggattaattgacccctgtctatggaattacatgtaaaacattatcttgtcactgtagtttggttttatttgaaaacctgacaaaaaaaaagttccaggtgtggaatatgggggttatctgtacatcctggggcattaaaaaaaaaatcaatggtggggaactataaagaagtaacaaaagaagtgacatcttcagcaaataaactaggaaatttttttttcttccagtttagaatcagccttgaaacattgatggaataactctgtggcattattgcattatataccatttatctgtattaactttggaatgtactctgttcaatgtttaatgctgtggttgatatttcgaaagctgctttaaaaaaatacatgcatctcagcgtttttttgtttttaattgtatttagttatggcctatacactatttgtgagcaaaggtgatcgttttctgtttgagatttttatctcttgattcttcaaaagcattctgagaaggtgagataagccctgagtctcagctacctaagaaaaacctggatgtcactggccactgaggagctttgtttcaaccaagtcatgtgcatttccacgtcaacagaattgtttattgtgacagttatatctgttgtccctttgaccttgtttcttgaaggtttcctcgtccctgggcaattccgcatttaattcatggtattcaggattacatgcatgtttggttaaacccatgagattcattcagttaaaaatccagatggcaaatgaccagcagattcaaatctatggtggtttgacctttagagagttgctttacgtggcctgtttcaacacagacccacccagagccctcctgccctccttccgcgggggctttctcatggctgtccttcagggtcttcctgaaatgcagtggtgcttacgctccaccaagaaagcaggaaacctgtggtatgaagccagacctccccggcgggcctcagggaacagaatgatcagacctttgaatgattctaatttttaagcaaaatattattttatgaaaggtttacattgtcaaagtgatgaatatggaatatccaatcctgtgctgctatcctgccaaaatcattttaatggagtcagtttgcagtatgctccacgtggtaagatcctccaagctgctttagaagtaacaatgaagaacgtggacgcttttaatataaagcctgttttgtcttctgttgttgttcaaacgggattcacagagtatttgaaaaatgtatatatattaagaggtcacgggggctaattgctggctggctgccttttgctgtggggttttgttacctggttttaataacagtaaatgtgcccagcctcttggccccagaactgtacagtattgtggctgcacttgctctaagagtagttgatgttgcattttccttattgttaaaaacatgttagaagcaatgaatgtatataaaagcctcaactagtcatttttttctcctcttcttttttttcattatatctaattattttgcagttgggcaacagagaaccatccctattttgtattgaagagggattcacatctgcatcttaactgctctttatgaatgaaaaaacagtcctctgtatgtactcctctttacactggccagggtcagagttaaatagagtatatgcactttccaaattggggacaagggctctaaaaaaagccccaaaaggagaagaacatctgagaacctcctcggccctcccagtccctcgctgcacaaatactccgcaagagaggccagaatgacagctgacagggtctatggccatcgggtcgtctccgaagatttggcaggggcagaaaactctggcaggcttaagatttggaataaagtcacagaatcaaggaagcacctcaatttagttcaaacaagacgccaacattctctccacagctcacttacctctctgtgttcagatgtggccttccatttatatgtgatctttgttttattagtaaatgcttatcatctaaagatgtagctctggcccagtgggaaaaattaggaagtgattataaatcgagaggagttataataatcaagattaaatgtaaataatcagggcaatcccaacacatgtctagctttcacctccaggatctattgagtgaacagaattgcaaatagtctctatttgtaattgaacttatcctaaaacaaatagtttataaatgtgaacttaaactctaattaattccaactgtacttttaaggcagtggctgtttttagactttcttatcacttatagttagtaatgtacacctactctatcagagaaaaacaggaaaggctcgaaatacaagccattctaaggaaattagggagtcagttgaaattctattctgatcttattctgtggtgtcttttgcagcccagacaaatgtggttacacactttttaagaaatacaattctacattgtcaagcttatgaaggttccaatcagatctttattgttattcaatttggatctttcagggattttttttttaaattattatgggacaaaggacatttgttggaggggtgggagggaggaacaatttttaaatataaaacattcccaagtttggatcagggagttggaagttttcagaataaccagaactaagggtatgaaggacctgtattggggtcgatgtgatgcctctgcgaagaaccttgtgtgacaaatgagaaacattttgaagtttgtggtacgacctttagattccagagacatcagcatggctcaaagtgcagctccgtttggcagtgcaatggtataaatttcaagctggatatgtctaatgggtatttaaacaataaatgtgcagttttaactaacaggatatttaatgacaaccttctggttggtagggacatctgtttctaaatgtttattatgtacaatacagaaaaaaattttataaaattaagcaatgtgaaactgaattggagagtgataatacaagtcctttagtcttacccagtgaatcattctgttccatgtctttggacaaccatgaccttggacaatcatgaaatatgcatctcactggatgcaaagaaaatcagatggagcatgaatggtactgtaccggttcatctggactgccccagaaaaataacttcaagcaaacatcctatcaacaacaaggttgttctgcataccaagctgagcacagaagatgggaacactggtggaggatggaaaggctcgctcaatcaagaaaattctgagactattaataaataagactgtagtgtagatactgagtaaatccatgcacctaaaccttttggaaaatctgccgtgggccctccagatagctcatttcattaagtttttccctccaaggtagaatttgcaagagtgacagtggattgcatttcttttggggaagctttcttttggtggttttgtttattataccttcttaagttttcaaccaaggtttgcttttgttttgagttactggggttatttttgttttaaataaaaataagtgtacaataagtgtttttgtattgaaagcttttgttatcaagattttcatacttttaccttccatggctctttttaagattgatacttttaagaggtggctgatattctgcaacactgtacacataaaaaatacggtaaggatactttacatggttaaggtaaagtaagtctccagttggccaccattagctataatggcactttgtttgtgttgttggaaaaagtcacattgccattaaactttccttgtctgtctagttaatattgtgaagaaaaataaagtacagtgtgagatactg

SEQ ID NO: 171 - DNA, 4740 bp, HUMAN
ttccggtttttctcaggggacgttgaaattatttttgtaacgggagtcgggagaggacggggcgtgccccgcgtgcgcgcgcgtcgtcctccccggcgctcctccacagctcgctggctcccgccgcggaaaggcgtcatgccgcccaaaaccccccgaaaaacggccgccaccgccgccgctgccgccgcggaacccccggcaccgccgccgccgccccctcctgaggaggacccagagcaggacagcggcccggaggacctgcctctcgtcaggcttgagtttgaagaaacagaagaacctgattttactgcattatgtcagaaattaaagataccagatcatgtcagagagagagcttggttaacttgggagaaagtttcatctgtggatggagtattgggaggttatattcaaaagaaaaaggaactgtggggaatctgtatctttattgcacgagttgacctagatgagatgtcgttcactttactgagctacagaaaaacatacgaaatcagtgtccataaattctttaacttactaaaagaaattgataccagtaccaaagttgataatgctatgtcaagactgttgaagaagtatgatgtattgtttgcactcttcagcaaattggaaaggacatgtgaacttatatatttgacacaacccagcagttcgatatctactgaaataaattctgcattggtgctaaaagtttcttggatcacatttttattagctaaaggggaagtattacaaatggaagatgatctggtgatttcatttcagttaatgctatgtgtccttgactattttattaaactctcacctcccatgttgctcaaagaaccatataaaacagctgttatacccattaatggttcacctcgaacacccaggcgaggtcagaacaggagtgcacggatagcaaaacaactagaaaatgatacaagaattattgaagttctctgtaaagaacatgaatgtaatatagatgaggtgaaaaatgtttatttcaaaaattttataccttttatgaattctcttggacttgtaacatctaatggacttccagaggttgaaaatctttctaaacgatacgaagaaatttatcttaaaaataaagatctagatcgaagattatttttggatcatgataaaactcttcagactgattctatagacagttttgaaacacagagaacaccacgaaaaagtaaccttgatgaagaggtgaatataattcctccacacactccagttaggactgttatgaacactatccaacaattaatgatgattttaaattctgcaagtgatcaaccttcagaaaatctgatttcctattttaacaactgcacagtgaatccaaaagaaagtatactgaaaagagtgaaggatataggatacatctttaaagagaaatttgctaaagctgtgggacagggttgtgtcgaaattggatcacagcgatacaaacttggagttcgcttgtattaccgagtaatggaatccatgcttaaatcagaagaagaacgattatccattcaaaattttagcaaacttctgaatgacaacatttttcatatgtctttattggcgtgcgctcttgaggttgtaatggccacatatagcagaagtacatctcagaatcttgattctggaacagatttgtctttcccatggattctgaatgtgcttaatttaaaagcctttgatttttacaaagtgatcgaaagttttatcaaagcagaaggcaacttgacaagagaaatgataaaacatttagaacgatgtgaacatcgaatcatggaatcccttgcatggctctcagattcacctttatttgatcttattaaacaatcaaaggaccgagaaggaccaactgatcaccttgaatctgcttgtcctcttaatcttcctctccagaataatcacactgcagcagatatgtatctttctcctgtaagatctccaaagaaaaaaggttcaactacgcgtgtaaattctactgcaaatgcagagacacaagcaacctcagccttccagacccagaagccattgaaatctacctctctttcactgttttataaaaaagtgtatcggctagcctatctccggctaaatacactttgtgaacgccttctgtctgagcacccagaattagaacatatcatctggacccttttccagcacaccctgcagaatgagtatgaactcatgagagacaggcatttggaccaaattatgatgtgttccatgtatggcatatgcaaagtgaagaatatagaccttaaattcaaaatcattgtaacagcatacaaggatcttcctcatgctgttcaggagacattcaaacgtgttttgatcaaagaagaggagtatgattctattatagtattctataactcggtcttcatgcagagactgaaaacaaatattttgcagtatgcttccaccaggccccctaccttgtcaccaatacctcacattcctcgaagcccttacaagtttcctagttcacccttacggattcctggagggaacatctatatttcacccctgaagagtccatataaaatttcagaaggtctgccaacaccaacaaaaatgactccaagatcaagaatcttagtatcaattggtgaatcattcgggacttctgagaagttccagaaaataaatcagatggtatgtaacagcgaccgtgtgctcaaaagaagtgctgaaggaagcaaccctcctaaaccactgaaaaaactacgctttgatattgaaggatcagatgaagcagatggaagtaaacatctcccaggagagtccaaatttcagcagaaactggcagaaatgacttctactcgaacacgaatgcaaaagcagaaaatgaatgatagcatggatacctcaaacaaggaagagaaatgaggatctcaggaccttggtggacactgtgtacacctctggattcattgtctctcacagatgtgactgtataactttcccaggttctgtttatggccacatttaatatcttcagctctttttgtggatataaaatgtgcagatgcaattgtttgggtgagtcctaagccacttgaaatgttagtcattgttatttatacaagattgaaaatcttgtgtaaatcctgccatttaaaaagttgtagcagattgtttcctcttccaaagtaaaattgctgtgctttatggatagtaagaatggccctagagtgggagtcctgataacccaggcctgtctgactactttgccttcttttgtagcatataggtgatgtttgctcttgtttttattaatttatatgtatatttttttaatttaacatgaacacccttagaaaatgtgtcctatctatcttccaaatgcaatttgattgactgcccattcaccaaaattatcctgaactcttctgcaaaaatggatattattagaaattagaaaaaaattactaattttacacattagattttattttactattggaatctgatatactgtgtgcttgttttataaaattttgcttttaattaaataaaagctggaagcaaagtataaccatatgatactatcatactactgaaacagatttcatacctcagaatgtaaaagaacttactgattattttcttcatccaacttatgtttttaaatgaggattattgatagtactcttggtttttataccattcagatcactgaatttataaagtacccatctagtacttgaaaaagtaaagtgttctgccagatcttaggtatagaggaccctaacacagtatatcccaagtgcactttctaatgtttctgggtcctgaagaattaagatacaaattaattttactccataaacagactgttaattataggagccttaatttttttttcatagagatttgtctaattgcatctcaaaattattctgccctccttaatttgggaaggtttgtgttttctctggaatggtacatgtcttccatgtatcttttgaactggcaattgtctatttatcttttatttttttaagtcagtatggtctaacactggcatgttcaaagccacattatttctagtccaaaattacaagtaatcaagggtcattatgggttaggcattaatgtttctatctgattttgtgcaaaagcttcaaattaaaacagctgcattagaaaaagaggcgcttctcccctcccctacacctaaaggtgtatttaaactatcttgtgtgattaacttatttagagatgctgtaacttaaaataggggatatttaaggtagcttcagctagcttttaggaaaatcactttgtctaactcagaattatttttaaaaagaaatctggtcttgttagaaaacaaaattttattttgtgctcatttaagtttcaaacttactattttgacagttattttgataacaatgacactagaaaacttgactccatttcatcattgtttctgcatgaatatcatacaaatcagttagtttttaggtcaagggcttactatttctgggtcttttgctactaagttcacattagaattagtgccagaattttaggaacttcagagatcgtgtattgagatttcttaaataatgcttcagatattattgctttattgcttttttgtattggttaaaactgtacatttaaaattgctatgttactattttctacaattaatagtttgtctattttaaaataaattagttgttaagagtc

SEQ ID NO: 172 - DNA, 7824 bp, HUMAN
  misc_feature (1)..(7824): N=any base
aaagtatgtgcatgtataaatctgtgtgtcttccactttgtcccacatatactaaatttaaacattcttctaacgtgggaaaatccagtattttaatgtggacatcaactgcacaacgattgtcaggaaaacaatgcatatttgcactggtgatacatttgcaaaatctgtcatagtttgctactccttgcccttccatgaaccagagaattatctcagtttattagtcccctcccctaagaagcttccaccaatactcttttcccctttcctttaacttgattgtgaaatcaggtattcaacagagaaatttctcagcctcctacttctgcttttgaaagccataaaaacagcgagggagaaactggcagataccaaacctcttcgaggcacaaggcacaacaggctgctctgggattctcttcagccaatcttcattgctcaagtatgactttaatcttccttacaactaggtgctaagggagtctctctgtctctctgcctctttgtgtgtatgcatattctctctctctctctctttctttctctgtctctccctctccttccctctctgcctccctctctcagctttttgcaaaaagccaggtgtaatataatgcttatgactcgggaaatattctgggaatggatactgcttatctaacagctgacaccctaaaggttagtgtcaaagcctctgctccagctctcctagcctaatacattgctagttggggtttggtttagcaaatgcttttctctagacccaaaggacttctctttcacacattcattcatttactcagagatcatttctttgcatgactgccatgcactggatgctgagagaaatcacacatgaacgtagccgtcatggggaagtcactcattttctcctttttacacaggtgtctgaagcagccatggcagaagtacctgagctcgccagtgaaatgatggcttattacaggtcagtggagacgctgagaccagtaacatgagcaggtctcctctttcaagagtagagtgttatctgtgcttggagaccagatttttcccctaaattgcctctttcagtggcaaacagggtgccaagtaaatctgatttaaagactactttcccattacaagtccctccagccttgggacctggaggctatccagatgtgttgttgcaagggcttcctgcagaggcaaatggggagaaaagactccaagcccacaatacaaggaatccctttgcaaagtgtggcttggagggagagggagagctcagattttagctgactctgctgggctagaggttaggcctcaagatccaacagggagcncccagggtgcccacctgccaggcctagaatctgccttctggactgttctgcgcatatcactgtgaaacttgccaggtgtttcaggcagctttgagaggcaggctgtttgcagtttcttatgaacagtcaagtcttgtacacagggaaggaaaaataaacctgtttagaagacataattgagacatgtccctgtttttattacagtggcaatgaggatgacttgttctttgaagctgatggccctaaacagatgaaggtaagactatgggtttaactcccaacccaaggaagggctctaacacagggaaagctcaaagaagggagttctgggccactttgatgccatggtattttgttttagaaagactttaacctcttccagtgagacacaggctgcaccacttgctgacctggccacttggtcatcatatcaccacagtcactcactaacgttggtggtggtggccacacttggtggtgacaggggaggagtagtgataatgtttcccatttcatagtaggaagacaaccaagtcttcaacataaatttgattatccttttaagagatggattcagcctatgccaatcacttgagttaaactctgaaaccaagagatgatcttgagaactaacatatgtctaccccttttgagtagaatagttttttgctacctggggtgaagcttataacaacaagacatagatgatataaacaaaaagatcaattgagacttgaaagaaaaccattcacttgctgtttgaccttgacaagtcattttacccgctttggacctcatctgaaaaataaagggctgagctggatgatctctgagattccagcatcctgcaacctccagttctgaaatattttcagttgtagctaagggcatttgggcagcaaatggtcatttttcagactcatccttacaaagagccatgttatattcctgctgtcccttctgttttatatgatggctcagtagccttcctagtggcccagccatcagcctagctaggtcagttgtgcaggttggaggcagccacttttctctggctttattttattccagtttgtgatagcctcccctagcctcataatccagtcctcaatcttgttaaaaacatatttctttagaagttttaagactggcataacttgttggctgcagctgtgggaggagcccattggcttgtctgcctggcctttgcccccattgcctcttccagcagcttggcgctgctccaggcaggaaattctctcctgctcaactttcttttgtgcacttacaggtctctttaactgtctttcaagcctttgaaccattatcactgccttaaggcaacctcagtgaagccttaatacggagcttctctgaataagaggaaagtggtaacatttcacaaaaagtactctcacaggatttgcagaatgcctatgagacagtgttatgaaaaaggaaaaaaaagaacagtgtagaaaaattgaatacttgctgagtgagcataggtgaatggaaaatgttatggtcatctgcatgaaaaagcaaatcatagtgtgacagcattagggatacaaaaagatatagagaaggtatacatgtatggtgtaggtggggcatgtacaaaaaagatgaacaaagtagaaatgggatttattctaaagaatagcctgtaaggtgtcagaaagcccacattctagtcttgagtctgtttctaacctgctgtgtgcccttgagtacacacttaacctcttgagcttcagagagggataatctttttattttattttattttattttgttttgttttgttttgttttgttttatgagacagagtctcactctgttgcccaggctggagtgcagtggtacaatcttggcttactgcatcctccacctcctgagttcaagcgattctccttcctcagtctcctgaatagctaggattacaggtgcaccccaccacacccagctaatttttgtatttttagtagagaaggggtttcgccatgttggccaggctggttttgaagtcctgacctaaatgattcatccacctcggcttcccaaagtgctgggattacaggcatgagccaccacgcctggcccagagagggatgatctttagaagctcgggattctttcaagccctttcctcctctctgagctttctactctctgatgtcaaagcatggttcctggcaggaccacctcaccaggctccctccctcgctctctccgcagtgctccttccaggacctggacctctgccctctggatggcggcatccagctacgaatctccgaccaccactacagcaagggcttcaggcaggccgcgtcagttgttgtggccatggacaagctgaggaagatgctggttccctgcccacagaccttccaggagaatgacctgagcaccttctttcccttcatctttgaagaaggtagttagccaagagcaggcagtagatctccacttgtgtcctcttggaagtcatcaagccccagccaactcaattcccccagagccaaagccctttaaaggtagaaggcccagcggggagacaaaacaaagaaggctggaaaccaaagcaatcatctctttagtggaaactattcttaaagaagatcttgatggctactgacatttgcaactccctcactctttctcaggggcctttcacttacattgtcaccagaggttcgtaacctccctgtgggctagtgttatgaccatcaccattttacctaagtagctctgttgctcggccacagtgagcagtaatagacctgaagctggaacccatgtctaatagtgtcaggtccatgttcttagccaccccactcccagcttcatccctactggtgttgtcatcagactttgaccgtatatgctcagtgtcctccaagaaatcaaattttgccgcctcgcctcacgaggcctgcccttctgattttatacctaaacaacatgtgctccacatttcagaacctatcttcttcgacacatgggataacgaggcttatgtgcacgatgcacctgtacgatcactgaactgcacgctccgggactcacagcaaaaaagcttggtgatgtctggtccatatgaactgaaagctctccacctccagggacaggatatggagcaacaaggtaaatggaaacatcctggtttccctgcctggcctcctggcagcttgctaattctccatgttttaaacaaagtagaaagttaatttaaggcaaatgatcaacacaagtgaaaaaaaatattaaaaaggaatatacaaactttggtcctagaaatggcacatttgattgcactggccagtgcatttgttaacaggagtgtgaccctgagaaattagacggtcaagcactcccaggaccatgtccacccaagtctcttgggcatagtgcaatgtcaattcttccacaatatcccctcatttgatggacatggcctaactgcctgtgggttctctcttcctgttgttgaggctgaaacaagagtgctggagcgataatgtgtccatcccctccccagtcttccccccttgccccaacagtccgtcccacccaatgcaggtggttcttgtagggaaattttaccgcccagcaggaacttatatctctccgctgtaacgggcaaaagtttcaagtgcggtgaacccatcattagctgtggtgatctgcctggcatcgtgccacagtagccaaagcctctgcacaggagtgtgggcaactaaggctgctgactttgaaggacagcctcactcagggggaagctatttgctctcagccaggccaagaaaatcctgtttctttggaatcgggtagtaagagtgatcccagggcctccaattgacactgctgtgactgaggaagatcaaaatgagtgtctctctttggagccactttcccagctcagcctctcctctcccagtttcttcccatgggctactctctgttcctgaaacagttctggtgcctgatttctggcagaagtacagcttcacctctttcctttccttccacattgatcaagttgttccgctcctgtggatgggcacattgccagccagtgacacaatggcttccttccttccttccttcagcatttaaaatgtagaccctctttcattctccgttcctactgctatgaggctctgagaaacctcaggcctttgaggggaaaccctaaatcaacaaaatgaccctgctattgtctgtgagaagtcaagttatcctgtgtcttaggccaaggaacctcactgtgggttcccacagaggctaccaaattacatgtatcctactcatggggcctaggggttggggtgaccctgcactgctgtgtccctaaccacaagacccccttctttcttcagtggtgttctccatgtcctttgtacaaggagaagaaagtaatgacaaaatacctgtggccttgggcctcaaggaaaagaatctgtacctgtcctgcgtgttgaaagatgataagcccactctacagctggaggtaagtgaatgctatggaatgaagcccttctcagcctcctgctaccacttattcccagacaaccaccttctccccgcccccatccctaggaaaagctgggaacaggtctatttgacaattttgcattaatgtaaataaatttaacataatttttaactgcgtgcaaccttcaatcctgctgcagaaaattaaatcattttgccgatgttattatgtcctaccatagttacaaccccaacagattatatattgttagggctgctctcatttgatagacaccttgggaaatagatgacttaaagggtcccattatcacgtccactccactcccaaaatcaccaccactatcacctccagctttctcagcaaaagcttcatttccaagttgatgtcattctaggaccataaggaaaaatacaataaaaagcccctggaaactaggtacttcaagaagctctagcttaattttcaccccccaaaaaaaaaaaattctcacctacattatgctcctcagcatttggcactaagttttagaaaagaagagggctcttttaaataaattcacacagaaagttgggcccagttacaactcaggagtctggctcctgatcatgtgacctgctcgtcagtttcctttctggccaacccaaagaacatctttcccatagcatctttgtcccttgccccacaaaaattcttctttctctttcgtgcagagtgtagatcccaaaaattacccaaagaagaagatggaaaagcgatttgtcttcaacaagatagaaatcaataacaagctggaatttgagtctgcccagttccccaactggtacatcagcacctctcaagcagaaaacatgcccgtcttcctgggagggaccaaaggcggccaggatataactgacttcaccatgcaatttgtgtcttcctaaagagagctgtacccagagagtcctgtgctgaatgtggactcaatccctagggctggcagaaagggaacagaaaggtttttgagtacggctatagcctggactttcctgttgtctacaccaatgcccaactgcctgccttagggtagtgctaagaggatctcctgtccatcagccaggacagtcagctctctcctttcagggccaatccccagcccttttgttgagccaggcctctctcacctctcctactcacttaaagcccgcctgacagaaaccacggccacatttggttctaagaaaccctctgtcattcgctcccacattctgatgagcaaccgcttccctatttatttatttatttgtttgtttgttttattcattggtctaatttattcaaagggggcaagaagtagcagtgtctgtaaaagagcctagtttttaatagctatggaatcaattcaatttggactggtgtgctctctttaaatcaagtcctttaattaagactgaaaatatataagctcagattatttaaatgggaatatttataaatgagcaaatatcatactgttcaatggttctgaaataaacttcactgaagaaaaaaaaagggtctttcctgatcattgacttgtcttggatttgacactgaacagtaaagacaaacagggctgtgagagttcttgggggactaaagcccacctcctcattgctgagtgctgcaaagtcacctagaaatatcccttggccaccgaagactatcctcctcacccatcccctttatttctgttgttcaacagaaggatattcagtgcacatctggaacaggatcagctgaagcactgcagggagtcaggactggtagtaacagctaccagtgatttatctatcaatgcaccaaacatctgttgagcaagcgctatgtacgaggagctgggagtacagagatgagaacagtcacaagtccctcctcagataggagaggcagctagttataagcagaaacaaggtaacatgacaagtagagtaagataaagaacaa

SEQ ID NO: 173 - DNA, 405 bp, HUMAN
ggttcctggtcctcgcctcctccgctgtctccctggagttcttgcaagtcggccaggatgtctcaggctgagtttgagaaagctgcagaggaggttaggcaccttaagaccaagccatcggatgaggagatgctgttcatctatggccactacaaacaagcaactgtgggcgacataaatacagaacggcccgggatgttggacttcacgggcaaggccaagtgggatgcctggaatgagctgaaagggacttccaaggaagatgccatgaaagcttacatcaacaaagtagaagagctaaagaaaaaatacgggatatgagagactggatttggttactgtgccatgtgtttatcctaaactgagacaatgccttgtttttttctaataccgtggatggtggaa

SEQ ID NO: 174 - DNA, 2428 bp, HUMAN
cgaggcgctagggggaacgctggcctctgaaactagctctgggaccggggtctgcggccggcccctagctggccccgtctcccatccccagaagggtattcactggggattctgagctttggctactccagtttcccacgacacgatgttccctttctacagctgctggaggactggactgctactactactcctggctgtggcagtgagagaatcctggcagacagaagaaaaaacttgcgacttggtaggagaaaagggtaaagagtcagagaaagagttggctctagtgaagaggctgaaaccactgtttaataaaagctttgagagcactgtgggccagggttcagacacatacatctacatcttcagggtgtgccgggaagctggcaaccacacttctggggcaggcctggtgcaaatcaacaaaagtaatgggaaggagacagtggtagggagactcaacgagactcacatcttcaacggaagtaattggatcatgctgatctataaagggggtgatgaatatgacaaccactgtggcaaggagcagcgtcgtgcagtggtgatgatctcctgcaatcgacacaccctagcggacaattttaaccctgtgtctgaggagcgtggcaaagtccaagattgtttctacctctttgagatggatagcagcctggcctgttcaccagagatctcccacctcagtgtgggttccatcttacttgtcacgtttgcatcactggttgctgtttatgttgttggggggttcctataccagcgactggtagtgggagccaaaggaatggagcagtttccccacttagccttctggcaggatcttggcaacctggtagcagatggctgtgactttgtctgccgttctaaacctcgaaatgtgcctgcagcatatcgtggtgtgggggatgaccagctgggggaggagtcagaagaaagggatgaccatttattaccaatgtagattgcactttatatgtccagcctcttcctcagtcccccaaaccaaagctacacagccagatttctcaagcagtctcaactccagtccctcatctcacccttactattgctcttgctttccagtttgcttttgatttgcatcttctcactagtaaaactgccttccctttgttccttattttctgttttttctctagagaggtacagttgtaagtcagagttaatataatagggcctgtgaaaacagaggcttttgcattgtctcttgacatcagaagttacaataggcatatgggcaaaatggtgtagcaggctcactggccgtttgttttttaaacacattttcacaagtttttgagacactggatttctttaattaaaaaaaaaatgccaagaaacattatttatacagggttgattgctttcatgttgttattctgtaccctatagtagcctccatgagaatctggtatttcttgctgcttggaactactttgcagtgattacttggttgcagtccaagtactctcgtttagtctgagcctggagatgttctagacttgcttctcccacctctgagattaggacaggaaaaatgtgaaatttcccaattacaggattatacggtaccatcacatcatttgtggaaattggggtgactgtatagctgggattgggctaaggactgtggtcttatctgtccacatacagccaaaatgcctatccagaaatccagttcgttggaaaggaaaattggtactcctgtgccacaggggttccagaaaagggaagtcactttaccttgcggtggtgggatcctgatgtctttcatccatttgtagtaaaagctggtaaagcttttcttactcctggttccctaccagtatttctaaacatgtcgcactttctccacaggcatgtggttttgacctttttttcaatcttctagaaagggaacggaagcagaagtgggacatcgagggctctgctgtcctctgcgctgggtgtggaatgctgctgcacctgtcccttctgctggctcagggaagtgtcttcttgcccacatttctgtggggaaaggtttttaatcctctgatgcttccatcttcctgtttaggccatgtgcccagaaacctggactgatctttctttaatagtgaacccctgggccactgaagagtaacatggctccactggacacaaaagagggatggaatcaacaggcagggggccttttataagccttaggaaaagaaaatgaaactatttcatctttggacttttcaatactattggagtgatttttttctttctaaacagggaaaataatgttacaaaagcatcttttttgttatttgtttgcatccctcccccacaccctggtgttttaaaatgaagaaaaaaaaccatcaccttttgtacaaaaactcttaatgattaaaaaacaaac

SEQ ID NO: 175 - DNA, 1639 bp, HUMAN
acaaactttcagagacagcagagcacacaagcttctaggacaagagccaggaagaaaccaccggaaggaaccatctcactgtgtgtaaacatgacttccaagctggccgtggctctcttggcagccttcctgatttctgcagctctgtgtgaaggtgcagttttgccaaggagtgctaaagaacttagatgtcagtgcataaagacatactccaaacctttccaccccaaatttatcaaagaactgagagtgattgagagtggaccacactgcgccaacacagaaattattgtaaagctttctgatggaagagagctctgtctggaccccaaggaaaactgggtgcagagggttgtggagaagtttttgaagagggctgagaattcataaaaaaattcattctctgtggtatccaagaatcagtgaagatgccagtgaaacttcaagcaaatctacttcaacacttcatgtattgtgtgggtctgttgtagggttgccagatgcaatacaagattcctggttaaatttgaatttcagtaaacaatgaatagtttttcattgtaccatgaaatatccagaacatacttatatgtaaagtattatttatttgaatctacaaaaaacaacaaataatttttgaatataaggattttcctagatattgcacgggagaatatacaaatagcaaaattgggccaagggccaagagaatatccgaactttaatttcaggaattgaatgggtttgctagaatgtgatatttgaagcatcacataaaaatgatgggacaataaattttgccataaagtcaaatttagctggaaatcctggatttttttctgttaaatctggcaaccctagtctgctagccaggatccacaagtccttgttccactgtgccttggtttctcctttatttctaagtggaaaaagtattagccaccatcttacctcacagtgatgttgtgaggacatgtggaagcactttaagttttttcatcataacataaattattttcaagtgtaacttattaacctatttattatttatgtatttatttaagcatcaaatatttgtgcaagaatttggaaaaatagaagatgaatcattgattgaatagttataaagatgttatagtaaatttattttattttagatattaaatgatgttttattagataaatttcaatcagggtttttagattaaacaaacaaacaattgggtacccagttaaattttcatttcagataaacaacaaataattttttagtataagtacattattgtttatctgaaattttaattgaactaacaatcctagtttgatactcccagtcttgtcattgccagctgtgttggtagtgctgtgttgaattacggaataatgagttagaactattaaaacagccaaaactccacagtcaatattagtaatttcttgctggttgaaacttgtttattatgtacaaatagattcttataatattatttaaatgactgcatttttaaatacaaggctttatatttttaactttaagatgtttttatgtgctctccaaattttttttactgtttctgattgtatggaaatataaaagtaaatatgaaacatttaaaatataatttgttgtcaaagt

SEQ ID NO: 176 - DNA, 1191 bp, HUMAN
atgaactggcatctccccctcttcctcttggcctctgtgacgctgccttccatctgctcccacttcaatcctctgtctctcgaggaactaggctccaacacggggatccaggttttcaatcagattgtgaagtcgaggcctcatgacaacatcgtgatctctccccatgggattgcgtcggtcctggggatgcttcagctgggggcggacggcaggaccaagaagcagctcgccatggtgatgagatacggcgtaaatggagttggtaaaatattaaagaagatcaacaaggccatcgtctccaagaagaataaagacattgtgacagtggctaacgccgtgtttgttaagaatgcctctgaaattgaagtgccttttgttacaaggaacaaagatgtgttccagtgtgaggtccggaatgtgaactttgaggatccagcctctgcctgtgattccatcaatgcatgggttaaaaacgaaaccagggatatgattgacaatctgctgtccccagatcttattgatggtgtgctcaccagactggtcctcgtcaacgcagtgtatttcaagggtctgtggaaatcacggttccaacccgagaacacaaagaaacgcactttcgtggcagccgacgggaaatcctatcaagtgccaatgctggcccagctctccgtgttccggtgtgggtcgacaagtgcccccaatgatttatggtacaacttcattgaactgccctaccacggggaaagcatcagcatgctgattgcactgccgactgagagctccactccgctgtctgccatcatcccacacatcagcaccaagaccatagacagctggatgagcatcatggtccccaagagggtgcaggtgatcctgcccaagttcacagctgtagcacaaacagatttgaaggagccgctgaaagttcttggcattactgacatgtttgattcatcaaaggcaaattttgcaaaaataacaaggtcagaaaacctccatgtttctcatatcttgcaaaaagcaaaaattgaagtcagtgaagatggaaccaaagcttcagcagcaacaactgcaattctcattgcaagatcatcgcctccctggtttatagtagacagaccttttctgtttttcatccgacataatcctacaggtgctgtgttattcatggggcagataaacaaaccc

SEQ ID NO: 177 - DNA, 3215 bp, HUMAN
gacaatatcaggtgagctgtggaggtggggtccttggaagctggatgacagcagctggcaaggggataagagagcagtgagcccctccctcaaggaggtctggctttatccatagacagggccctctgaggtggggctgaggtacaaagggggattgagcagcccaggagaagagagatgggggttcccttcttctcttctctcagatgcatggtggacttaggaccttgctgggctgggggtctcactgcagagatgaagctgcttctggccctagcagggctcctggccattctggccacgccccagccctctgaaggtgctgctccagctgtcctgggggaggtggacacctcgttggtgctgagctccatggaggaggccaagcagctggtggacaaggcctacaaggagcggcgggaaagcatcaagcagcggcttcgcagcggctcagccagccccatggaactcctatcctacttcaagcagccggtggcagccaccaggacggcggtgagggccgctgactacctgcacgtggctctagacctgctggagaggaagctgcggtccctgtggcgaaggccattcaatgtcactgatgtgctgacgcccgcccagctgaatgtgttgtccaagtcaagcggctgcgcctaccaggacgtgggggtgacttgcccggagcaggacaaataccgcaccatcaccgggatgtgcaacaacagacgcagccccacgctgggggcctccaaccgtgcctttgtgcgctggctgccggcggagtatgaggacggcttctctcttccctacggctggacgcccggggtcaagcgcaacggcttcccggtggctctggctcgcgcggtctccaacgagatcgtgcgcttccccactgatcagctgactccggaccaggagcgctcactcatgttcatgcaatggggccagctgttggaccacgacctcgacttcacccctgagccggccgcccgggcctccttcgtcactggcgtcaactgcgagaccagctgcgttcagcagccgccctgcttcccgctcaagatcccgcccaatgacccccgcatcaagaaccaagccgactgcatcccgttcttccgctcctgcccggcttgccccgggagcaacatcaccatccgcaaccagatcaacgcgctcacttccttcgtggacgccagcatggtgtacggcagcgaggagcccctggccaggaacctgcgcaacatgtccaaccagctggggctgctggccgtcaaccagcgcttccaagacaacggccgggccctgctgccctttgacaacctgcacgatgacccctgtctcctcaccaaccgctcagcgcgcatcccctgcttcctggcaggggacacccgttccagtgagatgcccgagctcacctccatgcacaccctcttacttcgggagcacaaccggctggccacagagctcaagagcctgaaccctaggtgggatggggagaggctctaccaggaagcccggaagatcgtgggggccatggtccagatcatcacttaccgggactacctgcccctggtgctggggccaacggccatgaggaagtacctgcccacgtaccgttcctacaatgactcagtggacccacgcatcgccaacgtcttcaccaatgccttccgctacggccacaccctcatccaacccttcatgttccgcctggacaatcggtaccagcccatggaacccaacccccgtgtccccctcagcagggtcttttttgcctcctggagggtcgtgctggaaggtggcattgaccccatcctccggggcctcatggccacccctgccaagctgaatcgtcagaaccaaattgcagtggatgagatccgggagcgattgtttgagcaggtcatgaggattgggctggacctgcctgctctgaacatgcagcgcagcagggaccacggcctcccaggatacaatgcctggaggcgcttctgtgggctcccgcagcctgaaactgtgggccagctgggcacggtgctgaggaacctgaaattggcgaggaaactgatggagcagtatggcacgcccaacaacatcgacatctggatgggcggcgtgtccgagcctctgaagcgcaaaggccgcgtgggcccactcctcgcctgcatcatcggtacccagttcaggaagctccgggatggtgatcggttttggtgggagaacgagggtgtgttcagcatgcagcagcgacaggccctggcccagatctcattgccccggatcatctgcgacaacacaggcatcaccaccgtgtctaagaacaacatcttcatgtccaactcatatccccgggactttgtcaactgcagtacacttcctgcattgaacctggcttcctggagggaagcctcctagaggccaggtaagggggtgcagcagtgaggggtatatctgggctggccagttggaaccacggagatctccttgccctagatgagcccagccctgttctgggtgcagctgagaaaatgagtgactagacgttcatttgtgtgctcatgtatgtgcgaagtatataaattggcttttcatgcgtgtgtgttgtctgaacatggggagtgtttcatgggttatgtgtatgtgccatttatgtgagtgtgtgtttgtgctgatgagaatactgagtatgtggaaggcagcagagcggactggtgaggagcacagctcaggaactagactgcctgggttccaatcctggctctgtggcttgctagctatgtgaccttgagcaaattaccctccttaaacaagagttttcttccttgtaaattacatctgtcatggtttcttggagggcccacttgtatcctctggttcttcatttattgagcacctactacatgcaaggcactgtactaggcgtgagaagcatatagaggcaagaaagagataccaagatgccatctgtgtcctggttagcagagctggaccagtggtgccttggagggataagccagctgcagctgggctgtgtggttgacttatgggcccagccagccaggctcaggccatggctcccctttttcttcctcaccctgatttcttgcttattcactgaagttctcctgaagaggaactgggcctgttgccctttctgtaccatttatttgctcccaatgtttatgataataaaggcaccgctgatggggacctcc

SEQ ID NO: 178 - DNA, 3319 bp, HUMAN
ggcggtcccctgttctccccgctcaggtgcggcgctgtggcaggaagccaccccctcggtcggccggtgcgcggggctgttgcgccatccgctccggctttcgtaaccgcaccctgggacggcccagagacgctccagcgcgagttcctcaaatgttttcctgcgttgccaggaccgtccgccgctctgagtcatgtgcgagtgggaagtcgcactgacactgagccgggccagagggagaggagccgagcgcggcgcggggccgagggactcgcagtgtgtgtagagagccgggctcctgcggatgggggctgcccccggggcctgagcccgcctgcccgcccaccgccccgccccgcccctgccacccctgccgcccggttcccattagcctgtccgcctctgcgggaccatggagtggtagccgaggaggaagcatgctggccgtcggctgcgcgctgctggctgccctgctggccgcgccgggagcggcgctggccccaaggcgctgccctgcgcaggaggtggcaagaggcgtgctgaccagtctgccaggagacagcgtgactctgacctgcccgggggtagagccggaagacaatgccactgttcactgggtgctcaggaagccggctgcaggctcccaccccagcagatgggctggcatgggaaggaggctgctgctgaggtcggtgcagctccacgactctggaaactattcatgctaccgggccggccgcccagctgggactgtgcacttgctggtggatgttccccccgaggagccccagctctcctgcttccggaagagccccctcagcaatgttgtttgtgagtggggtcctcggagcaccccatccctgacgacaaaggctgtgctcttggtgaggaagtttcagaacagtccggccgaagacttccaggagccgtgccagtattcccaggagtcccagaagttctcctgccagttagcagtcccggagggagacagctctttctacatagtgtccatgtgcgtcgccagtagtgtcgggagcaagttcagcaaaactcaaacctttcagggttgtggaatcttgcagcctgatccgcctgccaacatcacagtcactgccgtggccagaaacccccgctggctcagtgtcacctggcaagacccccactcctggaactcatctttctacagactacggtttgagctcagatatcgggctgaacggtcaaagacattcacaacatggatggtcaaggacctccagcatcactgtgtcatccacgacgcctggagcggcctgaggcacgtggtgcagcttcgtgcccaggaggagttcgggcaaggcgagtggagcgagtggagcccggaggccatgggcacgccttggacagaatccaggagtcctccagctgagaacgaggtgtccacccccatgcaggcacttactactaataaagacgatgataatattctcttcagagattctgcaaatgcgacaagcctcccagtgcaagattcttcttcagtaccactgcccacattcctggttgctggagggagcctggccttcggaacgctcctctgcattgccattgttctgaggttcaagaagacgtggaagctgcgggctctgaaggaaggcaagacaagcatgcatccgccgtactctttggggcagctggtcccggagaggcctcgacccaccccagtgcttgttcctctcatctccccaccggtgtcccccagcagcctggggtctgacaatacctcgagccacaaccgaccagatgccagggacccacggagcccttatgacatcagcaatacagactacttcttccccagatagctggctgggtggcaccagcagcctggaccctgtggatgacaaaacacaaacgggctcagcaaaagatgcttctcactgccatgccagcttatctcaggggtgtgcggcctttggcttcacggaagagccttgcggaaggttctacgccaggggaaaatcagcctgctccagctgttcagctggttgaggtttcaaacctccctttccaaatgcccagcttaaaggggttagagtgaacttgggccactgtgaagagaaccatatcaagactctttggacactcacacggacactcaaaagctgggcaggttggtgggggcctcggtgtggagaagcggctggcagcccacccctcaacacctctgcacaagctgcaccctcaggcaggtgggatggatttccagccaaagcctcctccagccgccatgctcctggcccactgcatcgtttcatcttccaactcaaactcttaaaacccaagtgcccttagcaaattctgtttttctaggcctggggacggcttttacttaaacgccaaggcctgggggaagaagctctctcctccctttcttccctacagttcaaaaacagctgagggtgagtgggtgaataatacagtatgtcagggcctggtcgttttcaacagaattataattagttcctcattagcagttttgcctaaatgtgaatgatgatcctaggcatttgctgaatacagaggcaactgcattggctttgggttgcaggacctcaggtgagaagcagaggaaggagaggagaggggcacagggtctctaccatcccctgtagagtgggagctgagtgggggatcacagcctctgaaaaccaatgttctctcttctccacctcccacaaaggagagctagcagcagggagggcttctgccatttctgagatcaaaacggttttactgcagctttgtttgttgtcagctgaacctgggtaactagggaagataatattaaggaagacaatgtgaaaagaaaaatgagcctggcaagaatgcgtttaaacttggtttttaaaaaactgctgactgttttctcttgagagggtggaatatccaatattcgctgtgtcagcatagaagtaacttacttaggtgtgggggaagcaccataactttgtttagcccaaaaccaagtcaagtgaaaaaggaggaagagaaaaaatattttcctgccaggcatggaggcccacgcacttcgggaggtcgaggcaggaggatcacttgagtccagaagtttgagatcagcctgggcaatgtgataaaaccccatctctacaaaaagcataaaaattagccaagtgtggtagagtgtgcctgaagtcccagatacttggggggctgaggtgggaggatctcttgagcctgggaggtcaaggctgcagtgagccgagattgcaccactgcactccagcctggggtgacagagcaagtgagaccctgtctc

SEQ ID NO: 179 - DNA, 856 bp, HUMAN
cttgttcggggcgctccgctggcttcttggacaattgcgccatgtgtgctgctcggctagcggcggcggcggcccagtcggtgtatgccttctcggcgcgcccgttggccggcggggagcctgtgagcctgggctccctgcggggcaaggtactacttatcgagaatgtggcgtccctctgaggcaccacggtccgggactacacccagatgaacgagctgcagcggcgcctcggaccccggggcctggtggtgctcggcttcccgtgcaaccagtttgggcatcaggagaacgccaagaacgaagagattctgaattccctcaagtacgtccggcctggtggtgggttcgagcccaacttcatgctcttcgagaagtgcgaggtgaacggtgcgggggcgcaccctctcttcgccttcctgcgggaggccctgccagctcccagcgacgacgccaccgcgcttatgaccgaccccaagctcatcacctggtctccggtgtgtcgcaacgatgttgcctggaactttgagaagttcctggtgggccctgacggtgtgcccctacgcaggtacagccgccgcttccagaccattgacatcgagcctgacatcgaagccctgctgtctcaagggcccagctgtgcctagggcgcccctcctaccccggctgcttggcagttgcagtgctgctgtctcgggggggttttcatctatgagggtgtttcctctaaacctacgagggaggaacaccttgatcttacagaaaataccacctcgagatgggtgctggtcctgttgatcccagtctctgccagaccaaggcgagtttccccactaataaagtgccgggtgtcagc

SEQ ID NO: 180 - DNA, 369 bp, HUMAN
atgaagcttctcacgggcctggttttctgctccttggtcctgagtgtcagcagccgaagcttcttttcgttccttggcgaggcttttgatggggctcgggacatgtggagagcctactctgacatgagagaagccaattacatcggctcagacaaatacttccatgctcgggggaactatgatgctgccaaaaggggacctgggggtgcctgggccgcagaagtgatcagcaatgccagagagaatatccagagactcacaggccatggtgcggaggactcgctggccgatcaggctgccaataaatggggcaggagtggcagagaccccaatcacttccgacctgctggcctgcctgagaaatactga

SEQ ID NO: 181 - DNA, 4910 bp, HUMAN
tagacgcaccctctgaagatggtgactccctcctgagaagctggaccccttggtaaaagacaaggccttctccaagaagaatatgaaagtgttactcagacttatttgtttcatagctctactgatttcttctctggaggctgataaatgcaaggaacgtgaagaaaaaataattttagtgtcatctgcaaatgaaattgatgttcgtccctgtcctcttaacccaaatgaacacaaaggcactataacttggtataaagatgacagcaagacacctgtatctacagaacaagcctccaggattcatcaacacaaagagaaactttggtttgttcctgctaaggtggaggattcaggacattactattgcgtggtaagaaattcatcttactgcctcagaattaaaataagtgcaaaatttgtggagaatgagcctaacttatgttataatgcacaagccatatttaagcagaaactacccgttgcaggagacggaggacttgtgtgcccttatatggagttttttaaaaatgaaaataatgagttacctaaattacagtggtataaggattgcaaacctctacttcttgacaatatacactttagtggagtcaaagataggctcatcgtgatgaatgtggctgaaaagcatagagggaactatacttgtcatgcatcctacacatacttgggcaagcaatatcctattacccgggtaatagaatttattactctagaggaaaacaaacccacaaggcctgtgattgtgagcccagctaatgagacaatggaagtagacttgggatcccagatacaattgatctgtaatgtcaccggccagttgagtgacattgcttactggaagtggaatgggtcagtaattgatgaagatgacccagtgctaggggaagactattacagtgtggaaaatcctgcaaacaaaagaaggagtaccctcatcacagtgcttaatatatcggaaattgaaagtagattttataaacatccatttacctgttttgccaagaatacacatggtatagatgcagcatatatccagttaatatatccagtcactaatttccagaagcacatgattggtatatgtgtcacgttgacagtcataattgtgtgttctgttttcatctataaaatcttcaagattgacattgtgctttggtacagggattcctgctatgattttctcccaataaaagcttcagatggaaagacctatgacgcatatatactgtatccaaagactgttggggaagggtctacctctgactgtgatatttttgtgtttaaagtcttgcctgaggtcttggaaaaacagtgtggatataagctgttcatttatggaagggatgactacgttggggaagacattgttgaggtcattaatgaaaacgtaaagaaaagcagaagactgattatcattttagtcagagaaacatcaggcttcagctggctgggtggttcatctgaagagcaaatagccatgtataatgctcttgttcaggatggaattaaagttgtcctgcttgagctggagaaaatccaagactatgagaaaatgccagaatcgattaaattcattaagcagaaacatggggctatccgctggtcaggggactttacacagggaccacagtctgcaaagacaaggttctggaagaatgtcaggtaccacatgccagtccagcgacggtcaccttcatctaaacaccagttactgtcaccagccactaaggagaaactgcaaagagaggctcacgtgcctctcgggtagcatggagaagttgccaagagttctttaggtgcctcctgtcttatggcgttgcaggccaggttatgcctcatgctgacttgcagagttcatggaatgtaactatatcatcctttatccctgaggtcacctggaatcagattattaagggaataagccatgacgtcaatagcagcccagggcacttcagagtagagggcttgggaagatcttttaaaaaggcagtaggcccggtgtggtggctcacgcctataatcccagcactttgggaggctgaagtgggtggatcaccagaggtcaggagttcgagaccagcccagccaacatggcaaaaccccatctctactaaaaatacaaaaatgagctaggcatggtggcacacgcctgtaatcccagctacacctgaggctgaggcaggagaattgcttgaaccggggagacggaggttgcagtgagccgagtttgggccactgcactctagcctggcaacagagcaagactccgtctcaaaaaaagggcaataaatgccctctctgaatgtttgaactgccaagaaaaggcatggagacagcgaactagaagaaagggcaagaaggaaatagccaccgtctacagatggcttagttaagtcatccacagcccaagggcggggctatgccttgtctggggaccctgtagagtcactgaccctggagcggctctcctgagaggtgctgcaggcaaagtgagactgacacctcactgaggaagggagacatattcttggagaactttccatctgcttgtattttccatacacatccccagccagaagttagtgtccgaagaccgaattttattttacagagcttgaaaactcacttcaatgaacaaagggattctccaggattccaaagttttgaagtcatcttagctttccacaggagggagagaacttaaaaaagcaacagtagcagggaattgatccacttcttaatgctttcctccctggcatgaccatcctgtcctttgttattatcctgcattttacgtctttggaggaacagctccctagtggcttcctccgtctgcaatgtcccttgcacagcccacacatgaaccatccttcccatgatgccgctcttctgtcatcccgctcctgctgaaacacctcccaggggctccacctgttcaggagctgaagcccatgctttcccaccagcatgtcactcccagaccacctccctgccctgtcctccagcttcccctcgctgtcctgctgtgtgaattcccaggttggcctggtggccatgtcgcctgcccccagcactcctctgtctctgctcttgcctcgacccttcctcctcctttgcctaggaggccttctcgcattttctctagctgatcagaattttaccaaaattcagaacatcctccaattccacagtctctgggagactttccctaagaggcgacttcctctccagccttctctctctggtcaggcccactgcagagatggtggtgagcacatctgggaggctggtctccctccagctggaattgctgctctctgagggagaggctgtggtggctgtctctgtccctcactgccttccaggagcaatttgcacatgtaacatagatttatgtaatgctttatgtttaaaaacattccccaattatcttatttaatttttgcaattattctaattttatatatagagaaagtgacctattttttaaaaaaatcacactctaagttctattgaacctaggacttgagcctccatttctggcttctagtctggtgttctgagtacttgatttcaggtcaataacggtcccccctcactccacactggcacgtttgtgagaagaaatgacattttgctaggaagtgaccgagtctaggaatgcttttattcaagacaccaaattccaaacttctaaatgttggaattttcaaaaattgtgtttagattttatgaaaaactcttctactttcatctattctttccctagaggcaaacatttcttaaaatgtttcattttcattaaaaatgaaagccaaatttatatgccaccgattgcaggacacaagcacagttttaagagttgtatgaacatggagaggacttttggtttttatatttctcgtatttaatatgggtgaacaccaacttttatttggaataataattttcctcctaaacaaaaacacattgagtttaagtctctgactcttgcctttccacctgctttctcctgggcccgctttgcctgcttgaaggaacagtgctgttctggagctgctgttccaacagacagggcctagctttcatttgacacacagactacagccagaagcccatggagcagggatgtcacgtcttgaaaagcctattagatgttttacaaatttaattttgcagattattttagtctgtcatccagaaaatgtgtcagcatgcatagtgctaagaaagcaagccaatttggaaacttaggttagtgacaaaattggccagagagtgggggtgatgatgaccaagaattacaagtagaatggcagctggaatttaaggagggacaagaatcaatggataagcgtgggtggaggaagatccaaacagaaaagtgcaaagttattccccatcttccaagggttgaattctggaggaagaagacacattcctagttccccgtgaacttcctttgacttattgtccccactaaaacaaaacaaaaaacttttaatgccttccacattaattagattttcttgcagtttttttatggcatttttttaaagatgccctaagtgttgaagaagagtttgcaaatgcaacaaaaatatttaattaccggttgttaaaactggtttagcacaatttatattttccctctcttgcctttcttatttgcaataaaaggtattgagccattttttaaatgacatttttgataaattatgtttgtactagttgatgaaggagttttttttaacctgtttatataattttgcagcagaagccaaattttttgtatattaaagcaccaaattcatgtacagcatgcatcacggatcaatagactgtacttattttccaataaaattttcaaactttgtactgttaaa

SEQ ID NO: 182 - DNA, 579 bp, HUMAN
atgcaggccatcaagtgtgtggtggtgggagacggagctgtaggtaaaacttgcctactgatcagttacacaaccaatgcatttcctggagaatatatccctactgtctttgacaattattctgccaatgttatggtagatggaaaaccggtgaatctgggcttatgggatacagctggacaagaagattatgacagattacgccccctatcctatccgcaaacagatgtgttcttaatttgcttttcccttgtgagtcctgcatcatttgaaaatgtccgtgcaaagtggtatcctgaggtgcggcaccactgtcccaacactcccatcatcctagtgggaactaaacttgatcttagggatgataaagacacgatcgagaaactgaaggagaagaagctgactcccatcacctatccgcagggtctagccatggctaaggagattggtgctgtaaaatacctggagtgctcggcgctcacacagcgaggcctcaagacagtgtttgacgaagcgatccgagcagtcctctgcccgcctcccgtgaagaagaggaagagaaaatgcctgctgttgtaa

SEQ ID NO: 183 - DNA, 579 bp, HUMAN
atgcaggccatcaagtgtgtggtggtgggagatggggccgtgggcaagacctgccttctcatcagctacaccaccaacgcctttcccggagagtacatccccaccgtgtttgacaactattcagccaatgtgatggtggacagcaagccagtgaacctggggctgtgggacactgctgggcaggaggactacgaccgtctccggccgctctcctatccacagacggacgtcttcctcatctgcttctccctcgtcagcccagcctcttatgagaacgtccgcgccaagtggttcccagaagtgcggcaccactgccccagcacacccatcatcctggtgggcaccaagctggacctgcgggacgacaaggacaccatcgagaaactgaaggagaagaagctggctcccatcacctacccgcagggcctggcactggccaaggagattgactcggtgaaatacctggagtgctcagccctcacccagagaggcctgaaaaccgtgttcgacgaggccatccgggccgtgctgtgccctcagcccacgcggcagcagaagcgcgcctgcagcctcctctag

SEQ ID NO: 184 - DNA, 2277 bp, HUMAN
acatggcgaacgaggttatcaagtgcaaggctgcagttgcttgggaggctggaaagcctctctccatagaggagatagaggtggcacccccaaaggctcatgaagttcgaatcaagatcattgccactgcggtttgccacaccgatgcctataccctgagtggagctgatcctgagggttgttttccagtgatcttgggacatgaaggtgctggaattgtggaaagtgttggtgagggagttactaagctgaaggcgggtgacactgtcatcccactttacatcccacagtgtggagaatgcaaattttgtctaaatcctaaaactaacctttgccagaagataagagtcactcaagggaaaggattaatgccagatggtaccagcagatttacttgcaaaggaaagacaattttgcattacatgggaaccagcacattttctgaatacacagttgtggctgatatctctgttgctaaaatagatcctttagcacctttggataaagtctgccttctaggttgtggcatttcaaccggttatggtgctgctgtgaacactgccaagttggagcctggctctgtttgtgccgtctttggtctgggaggagtcggattggcagttatcatgggctgtaaagtggctggtgcttcccggatcattggtgtggacatcaataaagataaatttgcaagggccaaagagtttggagccactgaatgtattaaccctcaggattttagtaaacccatccaggaagtgctcattgagatgaccgatggaggagtggactattcctttgaatgtattggtaatgtgaaggtcatgagagcagcacttgaggcatgtcacaagggctggggcgtcagcgtcgtggttggagtagctgcttcaggtgaagaaattgccactcgtccattccagctggtaacaggtcgcacatggaaaggcactgcctttggaggatggaagagtgtagaaagtgtcccaaagttggtgtctgaatatatgtccaaaaagataaaagttgatgaatttgtgactcacaatctgtcttttgatgaaatcaacaaagcctttgaactgatgcattctggaaagagcattcgaactgttgtaaagatttaattcaaaagagaaaaataatgtccatcctgtcgtgatgtgataggagcagcttaacaggcagggagaagcgcctccaacctcacagcctcgtagagcttcacagctactccagaaaatagggttatgtgtgtcattcatgaatctctataatcaaggacaaggataattcagtcatgaacctgttttctggatgctcctccacataaataattgctagtttattaaggaatattttaacataataaaagtaatttctacatttgtgtggaaattgtcttgttttatgctgtcatcattgtcacggttgtctgccattatcttcattctgcaagggaaagggaaaggaagcagggcagtggtgggtgtctgaaacctcagaaacataacgttgaacttttaagggtctcagtccccgttgattaaagaacagatcctagccatcagtgacaaagttaatcaggacccaagtctgcttctgtgatattatcttgaagggaggtactgtgccttgttcatacctgtaccccaaattcctaggatgcatctgccttcagggggcactaaaatgtattattgaaacagcattctgggcttaaataggtgtatgtatgtgttggttgtgactgtactattctagtatagtgaactacatactgaatatccaagttctcagcacctacttttgtcaaatcttaacattttgccacttcgagatcacattgccttcctcccctccaagaggtaacaattatccacaatttgatgtttatcattcctgtgttgttgtactttcactgtgtataacctaaaccatctactctttagtactgttttatatatttttaagcctcatacttgctcattctacagcttttttcactcattattgtataattatatctgaagctctcgttcattaattttagtcctgtgtagcagaattcaattacgggaaactaccataatttatctgttctccagtccagttgaaggcatgaagttgttgccagtttctgtattataacactgtagtggaacattcttctgcattgggctactcgcgtgttacctaagacgtatcacagaataaacacatttagccttatagacattgccaaattgctcttcaaagtaaatgtgagtttttgtg

SEQ ID NO: 185 - DNA, 1230 bp, HUMAN
agacgttcgcacacctgggtgccagcgccccagaggtcccgggacagcccgaggcgccgcgcccgccgccccgagctccccaagccttcgagagcggcgcacactcccggtctccactcgctcttccaacacccgctcgttttgcggcagctcgtgtcccagagaccgagttgccccagagaccgagacgccgccgctgcgaaggaccaatgagagccccgctgctaccgccggcgccggtggtgctgtcgctcttgatactcggctcaggccattatgctgctggattggacctcaatgacacctactctgggaagcgtgaaccattttctggggaccacagtgctgatggatttgaggttacctcaagaagtgagatgtcttcagggagtgagatttcccctgtgagtgaaatgccttctagtagtgaaccgtcctcgggagccgactatgactactcagaagagtatgataacgaaccacaaatacctggctatattgtcgatgattcagtcagagttgaacaggtagttaagcccccccaaaacaagacggaaagtgaaaatacttcagataaacccaaaagaaagaaaaagggaggcaaaaatggaaaaaatagaagaaacagaaagaagaaaaatccatgtaatgcagaatttcaaaatttctgcattcacggagaatgcaaatatatagagcacctggaagcagtaacatgcaaatgtcagcaagaatatttcggtgaacggtgtggggaaaagtccatgaaaactcacagcatgattgacagtagtttatcaaaaattgcattagcagccatagctgcctttatgtctgctgtgatcctcacagctgttgctgttattacagtccagcttagaagacaatacgtcaggaaatatgaaggagaagctgaggaacgaaagaaacttcgacaagagaatggaaatgtacatgctatagcataactgaagataaaattacaggatatcacattggagtcactgccaagtcatagccataaatgatgagtcggtcctctttccagtggatcataagacaatggaccctttttgttatgatggttttaaactttcaattgtcactttttatgctatttctgtatataaaggtgcacgaaggtaaaaagtattttttcaagttgtaaataatttatttaatatttaatggaagtgtatttattttacagctcattaaacttttttaacc

SEQ ID NO: 186 - DNA, 1818 bp, HUMAN
tagtctggagctatggtggtggtggcagccgcgccgaacccggccgacgggacccctaaagttctgcttctgtcggggcagcccgcctccgccgccggagccccggcggccaggctgccgctcatggtgccagcccagagaggggccagcccggaggcagcgagcggggggctgccccaggcgcgcaagcgacagcgcctcacgcacctgagccccgaggagaaggcgctgaggaggaaactgaaaaacagagtagcagctcagactgccagagatcgaaagaaggctcgaatgagtgagctggaacagcaagtggtagatttagaagaagagaaccaaaaacttttgctagaaaatcagcttttacgagagaaaactcatggccttgtagttgagaaccaggagttaagacagcgcttggggatggatgccctggttgctgaagaggaggcggaagccaaggggaatgaagtgaggccagtggccgggtctgctgagtccgcagcactcagactacgtgcacctctgcagcaggtgcaggcccagttgtcacccctccagaacatctccccatggattctggcggtattgactcttcagattcagagtctgatatcctgttgggcattctggacaacttggacccagtcatgttcttcaaatgcccttccccagagcctgccagcctggaggagctcccagaggtctacccagaaggacccagttccttaccagcctccctttctctgtcagtggggacgtcatcagccaagctggaagccattaatgaactaattcgttttgaccacatatataccaagcccctagtcttagagataccctctgagacagagagccaagctaatgtggtagtgaaaatcgaggaagcacctctcagcccctcagagaatgatcaccctgaattcattgtctcagtgaaggaagaacctgtagaagatgacctcgttccggagctgggtatctcaaatctgctttcatccagccactgcccaaagccatcttcctgcctactggatgctacagtgactgtggatacgggggttccctttccccattcagtgacatgtcctctctgcttggtgtaaacattcttgggaggacacttttgccaatgaactctttccccagctgattagtgtctaaggaatgatccaatactgttgcccttttccttgactattacactgcctggaggatagcagagaagcctgtctgtacttcattcaaaaagccaaaatagagagtatacagtcctagagaatccctctatttgttcagatctcatagatgacccccaggtattgccttttgacatccagcagtccaaggtattgagacatattactggaagtaagaaatattactataattgagaactacagcttttaagattgtacttttaagattgtacttttatcttaaaagggtggtagttttccctaaaatacttattatgtaagggtcattagacaaatgtcttgaagtagacatggaatttatgaatggtctttatcatttctcttccccctttttggcatcctggcttgcctccagttttaggtcctttagtttgcttctgcaagcaacgggaacacctgctgagggggctctttccctcatgtatacttcaagtaagatcaagaatcttttgtgaaattatagaaatttactatgtaaatgcttgatggaattttttcctgctagtgtagcttctgaaaggtgctttctccatttatttaaaaactacccatgcaattaaaaggtacaatgcaaaaaaaaaaaaaaaaaaattttttt

SEQ ID NO: 187 - DNA, 1035 bp, HUMAN
gaattccggcccgccgtcccccaccccgccgccccgcccggcgaattgcgccccgcgcccctcccctcgcgcccccgagacaaagaggagagaaagtttgcgcggccgagcggggcaggtgaggagggtgagccgcgcgggaggggcccgcctcggccccggctcagcccccgcccgcgcccccagcccgccgccgcgagcagcgcccggaccccccagcggcggcccccgcccgcccagccccccggcccgccatgggcgccgcggcccgcaccctgcggctggcgctcggcctcctgctgctggcgacgctgcttcgcccggccgacgcctgcagctgctccccggtgcacccgcaacaggcgttttgcaatgcagatgtagtgatcagggccaaagcggtcagtgagaaggaagtggactctggaaacgacatttatggcaaccctatcaagaggatccagtatgagatcaagcagataaagatgttcaaagggcctgagaaggatatagagtttatctacacggccccctcctcggcagtgtgtggggtctcgctggacgttggaggaaagaaggaatatctcattgcaggaaaggccgagggggacggcaagatgcacatcaccctctgtgacttcatcgtgccctgggacaccctgagcaccacccagaagaagagcctgaaccacaggtaccagatgggctgcgagtgcaagatcacgcgctgccccatgatcccgtgctacatctcctccccggacgagtgcctctggatggactgggtcacagagaagaacatcaacgggcaccaggccaagttcttcgcctgcatcaagagaagtgacggctcctgtgcgtggtaccgcggcgcggcgccccccaagcaggagtttctcgacatcgaggacccataagcaggcctccaacgcccctgtggccaactgcaaaaaaagcctccaagggtttcgactggtccagctctgacatcccttcctggaaacagcatgaataaaacactcatccccggaattc

SEQ ID NO: 188 - DNA, 2087 bp, HUMAN
ctttggggttcaagatcactgggaccaggccgtgatctctatgcccgagtctcaaccctcaactgtcaccccaaagcacttgggacgtcctggacagaccgagtcccgggaagccccagcactgccgctgccacactgccctgagcccaaatgggggagtgagaggccatagctgtctggcatgggcctctccaccgtgcctgacctgctgctgccgctggtgctcctggagctgttggtgggaatatacccctcaggggttattggactggtccctcacctaggggacagggagaagagagatagtgtgtgtccccaaggaaaatatatccaccctcaaaataattcgatttgctgtaccaagtgccacaaaggaacctacttgtacaatgactgtccaggcccggggcaggatacggactgcagggagtgtgagagcggctccttcaccgcttcagaaaaccacctcagacactgcctcagctgctccaaatgccgaaaggaaatgggtcaggtggagatctcttcttgcacagtggaccgggacaccgtgtgtggctgcaggaagaaccagtaccggcattattggagtgaaaaccttttccagtgcttcaattgcagcctctgcctcaatgggaccgtgcacctctcctgccaggagaaacagaacaccgtgtgcacctgccatgcaggtttctttctaagagaaaacgagtgtgtctcctgtagtaactgtaagaaaagcctggagtgcacgaagttgtgcctaccccagattgagaatgttaagggcactgaggactcaggcaccacagtgctgttgcccctggtcattttctttggtctttgccttttatccctcctcttcattggtttaatgtatcgctaccaacggtggaagtccaagctctactccattgtttgtgggaaatcgacacctgaaaaagagggggagcttgaaggaactactactaagcccctggccccaaacccaagcttcagtcccactccaggcttcacccccaccctgggcttcagtcccgtgcccagttccaccttcacctccagctccacctatacccccggtgactgtcccaactttgcggctccccgcagagaggtggcaccaccctatcagggggctgaccccatccttgcgacagccctcgcctccgaccccatccccaacccccttcagaagtgggaggacagcgcccacaagccacagagcctagacactgatgaccccgcgacgctgtacgccgtggtggagaacgtgcccccgttgcgctggaaggaattcgtgcggcgcctagggctgagcgaccacgagatcgatcggctggagctgcagaacgggcgctgcctgcgcgaggcgcaatacagcatgctggcgacctggaggcggcgcacgccgcggcgcgaggccacgctggagctgctgggacgcgtgctccgcgacatggacctgctgggctgcctggaggacatcgaggaggcgctttgcggccccgccgccctcccgcccgcgcccagtcttctcagatgaggctgcgccctgcgggcagctctaaggaccgtcctgcgagatcgccttccaaccccacttttttctggaaaggaggggtcctgcaggggcaagcaggagctagcagccgcctacttggtgctaacccctcgatgtacatagcttttctcagctgcctgcgcgccgccgacagtcagcgctgtgcgcgcggagagaggtgcgccgtgggctcaagagcctgagtgggtggtttgcgaggatgagggacgctatgcctcatgcccgttttgggtgtcctcaccagcaaggctgctcgggggcccctggttcgtccctgagcctttttcacagtgcataagcagttttttttgtttttgttttgttttgttttgtttttaaatcaatcatgttacactaatagaaacttggcactcctgtgccctctgcctggacaagcacatagcaagctgaactgtcctaaggcaggggcgagcacggaacaatggggccttcagctggagctgtggacttttgtacatacactaaaattctgaagtta

SEQ ID NO: 189 - DNA, 1080 bp, HUMAN
cgcatctgcacctgcaggcccggctggtactgcgcgctgagcaagcaggaggggtgccggctgtgcgcgccgctgccgaagtgccgcccgggcttcggcgtggccagaccaggaactgaaacatcagacgtggtgtgcaagccctgtgccccggggacgttctccaacacgacttcatccacggatatttgcaggccccaccagatctgtaacgtggtggccatccctgggaatgcaagcagggatgcagtctgcacgtccacgtcccccacccggagtatggccccaggggcagtacacttaccccagccagtgtccacacgatcccaacacacgcagccaactccagaacccagcactgctccaagcacctccttcctgctcccaatgggccccagccccccagctgaagggagcactggcgacttcgctcttccagttggactgattgtgggtgtgacagccttgggtctactaataataggagtggtgaactgtgtcatcatgacccaggtgaaaaagaagcccttgtgcctgcagagagaagccaaggtgcctcacttgcctgccgataaggcccggggtacacagggccccgagcagcagcacctgctgatcacagcgccgagctccagcagcagctccctggagagctcggccagtgcgttggacagaagggcgcccactcggaaccagccacaggcaccaggcgtggaggccagtggggccggggaggcgaggaccagcaccgggagctcagattcttcccctggtggccatgggacccaggtcaatgtcacctgcatcgtgaacgtctgtagcagctctgaccacagctcacagtgctcctcccaagccagctccacaatgggagacacagattccagcccctcggagtccccgaaggacgagcaggtccccttctccaaggaggaatgtgcctttcggtcacagctggagacgccagagaccctgctggggagcaccgaagagaagcccctgccccttggagtgcctgatgctgggatgaagcccagttaaccaggccggtgtgggctgtgtcgtagccaaggtgggctg

SEQ ID NO: 190 - DNA, 741 bp, HUMAN
gagaaatttttcattttctttcttgtttgactgtatgcaaacatcaaactaagaatggcaaagatgaatctctcttcctatatattaatactaactttttctttgttttctcaaggtattttactttcagcatccaagtccataagaaatttagatgatgacatggtatttaatacattcaggttggggaaaggctttcagaaggaagacactgcagaaaaatcagttattgctccttccctggaacaatataaaaatgatgagagcagtttcatgaacgaagaggaaaataaagtttcaaagaacacaggctccaaacataatttcttaaatcatggtctgccactcaatctggctataaaaggatatcaagcactaaaaggatctgtagatttcccagctgagaatggagttcagaatactgaatcaacacaagaaaagagagaaattggggatgaagaaaactcagctaaatttcctataggaaggagagattttgacatgctcagatgtatgctcggaagagtctaccgaccctgttggcaagtctgatacctgttggtccacatcatcttttcagaagaaaataaaagcatttaattgccaatgggaggagaagcccatactgctactataacttgtgtatgttaaatgtctgttttaaaagaaagtagtgttaaatgtatcagtaactgaaatgatatgctttctctgtgcattaaatttgtgaaaattctgcat

SEQ ID NO: 191 - DNA, 1185 bp, HUMAN
gctcagggcacatgcctcccctccccaggccgcggcccagctgaccctcggggctcccccggcagcggacagggaagggttaaaggcccccggctccctgccccctgccctggggaacccctggccctgtggggacatgaactgtgtttgccgcctggtcctggtcgtgctgagcctgtggccagatacagctgtcgcccctgggccaccacctggcccccctcgagtttccccagaccctcgggccgagctggacagcaccgtgctcctgacccgctctctcctggcggacacgcggcagctggctgcacagctgagggacaaattcccagctgacggggaccacaacctggattccctgcccaccctggccatgagtgcgggggcactgggagctctacagctcccaggtgtgctgacaaggctgcgagcggacctactgtcctacctgcggcacgtgcagtggctgcgccgggcaggtggctcttccctgaagaccctggagcccgagctgggcaccctgcaggcccgactggaccggctgctgcgccggctgcagctcctgatgtcccgcctggccctgccccagccacccccggacccgccggcgcccccgctggcgcccccctcctcagcctgggggggcatcagggccgcccacgccatcctgggggggctgcacctgacacttgactgggccgtgaggggactgctgctgctgaagactcggctgtgacccggggcccaaagccaccaccgtccttccaaagccagatcttatttatttatttatttcagtactgggggcgaaacagccaggtgatccccccgccattatctccccctagttagagacagtccttccgtgaggcctgggggacatctgtgccttatttatacttatttatttcaggagcaggggtgggaggcaggtggactcctgggtccccgaggaggaggggactggggtcccggattcttgggtctccaagaagtctgtccacagacttctgccctggctcttccccatctaggcctgggcaggaacatatattatttatttaagcaattacttttcatgttggggtggggacggaggggaaagggaagcctgggtttttgtacaaaaatgtgagaaacctttgtgagacagagaacagggaattaaatgtgtcatacatatcc

SEQ ID NO: 192 - DNA, 1206 bp, HUMAN
gaattcccgccattgccgccatcgtcgtggggcttctggggcagctagggctggccgcgctgcctgcgccggaccggggcgggtccagtcccgggcgggccgtcgcgggagagaaataacatctgctttgctgccgagctcagaggagaccccagacccctcccgcagccagagggctggagcctgctcagaggtgctttgaagatgccggaggccccgcctctgctgttggcagctgtgttgctgggcctggtgctgctggtggtgctgctgctgcttctgaggcactggggctggggcctgtcgcttatcggctggaacgagttcatcctgcagcccatccacaacctgctcatgggtgacaccaaggagcagcgcatcctgaaccatgtgctgcagcatgcggagcccgggaacgcacagagcgtgctggaggccattgacacctactgcgagcagaaggagtgggccatgaacgtgggcgacaagaaaggcaagatcgtggacgccgtgattcaggagcaccagccctccgtgctgctggagctgggggcctactgtggctactcagctgtgcgcatggcccgcctgctgtcaccaggggcgaggctcatcaccatcgagatcaaccccgactgtgccgccatcacccagcggatggtggatttcgctggcatgaaggacaaggtcacccttgtggttggagcgtcccaggacatcatcccccagctgaagaagaagtatgatgtggacacactggacatggtcttcctcgaccactggaaggaccggtacctgccggacacgcttctcttggaggaatgtggcctgctgcggaaggggacagtgctactggctgacaacgtgatctgcccaggtgcgccagacttcctagcacacgtgcgcgggagcagctgctttgagtgcacacactaccaatcgttcctggaatacagggaggtggtggacggcctggagaaggccatctacaagggcccaggcagcgaagcagggccctgactgccccccccggcccccctctcgggctctctcacccagcctggtactgaaggtgccagacgtgctcctgctgaccttctgcggctccgggctgtgtcctaaatgcaaagcacacctcgccgagcctgcgccctgacatgctaacctctctgaactgcaacactggattgttcttttttaagactc

SEQ ID NO: 193 - DNA, 4426 bp, HUMAN
tgccttgaccaggacttgggactttgcgaaaggatcgcggggcccggagaggtgttggagagcacaatggctgaacaagtccttcctcaggctttgtatttgagcaatatgcggaaagctgtgaagatacgggagagaactccagaagacatttttaaacctactaatgggatcattcatcattttaaaaccatgcaccgatacacactggaaatgttcagaacttgccagttttgtcctcagtttcgggagatcatccacaaagccctcatcgacagaaacatccaggccaccctggaaagccagaagaaactcaactggtgtcgagaagtccggaagcttgtggcgctgaaaacgaacggtgacggcaattgcctcatgcatgccacttctcagtacatgtggggcgttcaggacacagacttggtactgaggaaggcgctgttcagcacgctcaaggaaacagacacacgcaactttaaattccgctggcaactggagtctctcaaatctcaggaatttgttgaaacggggctttgctatgatactcggaactggaatgatgaatgggacaatcttatcaaaatggcttccacagacacacccatggcccgaagtggacttcagtacaactcactggaagaaatacacatatttgtcctttgcaacatcctcagaaggccaatcattgtcatttcagacaaaatgctaagaagtttggaatcaggttccaatttcgcccctttgaaagtgggtggaatttacttgcctctccactggcctgcccaggaatgctacagataccccattgttctcggctatgacagccatcattttgtacccttggtgaccctgaaggacagtgggcctgaaatccgagctgttccacttgttaacagagaccggggaagatttgaagacttaaaagttcactttttgacagatcctgaaaatgagatgaaggagaagctcttaaaagagtacttaatggtgatagaaatccccgtccaaggctgggaccatggcacaactcatctcatcaatgccgcaaagttggatgaagctaacttaccaaaagaaatcaatctggtagatgattactttgaacttgttcagcatgagtacaagaaatggcaggaaaacagcgagcaggggaggagagaggggcacgcccagaatcccatggaaccttccgtgccccagctttctctcatggatgtaaaatgtgaaacgcccaactgccccttcttcatgtctgtgaacacccagcctttatgccatgagtgctcagagaggcggcaaaagaatcaaaacaaactcccaaagctgaactccaagccgggccctgaggggctccctggcatggcgctcggggcctctcggggagaagcctatgagcccttggcgtggaaccctgaggagtccactggggggcctcattcggccccaccgacagcacccagcccttttctgttcagtgagaccactgccatgaagtgcaggagccccggctgccccttcacactgaatgtgcagcacaacggattttgtgaacgttgccacaacgcccggcaacttcacgccagccacgccccagaccacacaaggcacttggatcccgggaagtgccaagcctgcctccaggatgttaccaggacatttaatgggatctgcagtacttgcttcaaaaggactacagcagaggcctcctccagcctcagcaccagcctccctccttcctgtcaccagcgttccaagtcagatccctcgcggctcgtccggagcccctccccgcattcttgccacagagctggaaacgacgcccctgctggctgcctgtctcaagctgcacggactcctggggacaggacggggacgagcaagtgcagaaaagccggctgcgtgtattttgggactccagaaaacaagggcttttgcacactgtgtttcatcgagtacagagaaaacaaacattttgctgctgcctcagggaaagtcagtcccacagcgtccaggttccagaacaccattccgtgcctggggagggaatgcggcacccttggaagcaccatgtttgaaggatactgccagaagtgtttcattgaagctcagaatcagagatttcatgaggccaaaaggacagaagagcaactgagatcgagccagcgcagagatgtgcctcgaaccacacaaagcacctcaaggcccaagtgcgcccgggcctcctgcaagaacatcctggcctgccgcagcgaggagctctgcatggagtgtcagcatcccaaccagaggatgggccctggggcccaccggggtgagcctgcccccgaagacccccccaagcagcgttgccgggcccccgcctgtgatcattttggcaatgccaagtgcaacggctactgcaacgaatgctttcagttcaagcagatgtatggctaaccggaaacaggtgggtcacctcctgcaagaagtggggcctcgagctgtcagtcatcatggtgctatcctctgaacccctcagctgccactgcaacagtgggcttaagggtgtctgagcaggagaggaaagataagctcttcgtggtgcccacgatgctcaggtttggtaacccgggagtgttcccaggtggccttagaaagcaaagcttgtaactggcaagggatgatgtcagattcagcccaaggttcctcctctcctaccaagcaggaggccaggaacttctttggacttggaaggtgtgcggggactggccgaggcccctgcaccctgcgcatcaggactgcttcatcgtcttggctgagaaagggaaaagacacacaagtcgcgtgggttggagaagccagagccattccacctcccctcccccagcatctctcagagatgtgaagccagatcctcatggcagcgaggccctctgcaagaagctcaaggaagctcagggaaaatggacgtattcagagagtgtttgtagttcatggtttttccctacctgcccggttcctttcctgaggacccggcagaaatgcagaaccatccatggactgtgattctgaggctgctgagactgaacatgttcacattgacagaaaaacaagctgctctttataatatgcaccttttaaaaaattagaatattttactgggaagacgtgtaactctttgggttattactgtctttacttctaaagaagttagcttgaactgaggagtaaaagtgtgtacatatataatatacccttacattatgtatgagggatttttttaaattatattgaaatgctgccctagaagtacaataggaaggctaaataataataacctgttttctggttgttgttggggcatgagcttgtgtatacactgcttgcataaactcaaccagctgcctttttaaagggagctctagtcctttttgtgtaattcactttatttattttattacaaacttcaagattatttaagtgaagatatttcttcagctctggggaaaatgccacagtgttctcctgagagaacatccttgctttgagtcaggctgtgggcaagttcctgaccacagggagtaaattggcctctttgatacacttttgcttgcctccccaggaaagaaggaattgcatccaaggtatacatacatattcatcgatgtttcgtgcttctccttatgaaactccagctatgtaataaaaaactatactctgtgttctgttaatgcctctgagtgtcctacctccttggagatgagatagggaaggagcagggatgagactggcaatggtcacagggaaagatgtggccttttgtgatggttttattttctgttaacactgtgtcctgggggggctgggaagtcccctgcatcccatggtaccctggtattgggacagcaaaagccagtaaccatgagtatgaggaaatctctttctgttgctggcttacagtttctctgtgtgctttgtggttgctgtcatatttgctctagaagaaaaaaaaaaaaggaggggaaatgcattttccccagagataaaggctgccattttgggggtctgtacttatggcctgaaaatatttgtgatccataactctacacagcctttactcatactattaggcacactttccccttagagccccctaagtttttcccagacgaatctttataatttcctttccaaagataccaaataaacttcagtgttttcatctaattctcttaaagttgatatcttaatattttgtgttgatcattatttccattcttaatgtgaaaaaaagtaattatttatacttattataaaaagtatttgaaatttgcacatttaattgtccctaatagaaagccacctattctttgttggatttcttcaagtttttctaaataaatgtaacttttcacaagagtcaacattaaaaaataaattattt

SEQ ID NO: 194 - DNA, 1810 bp, HUMAN
ggggggaaggccaagcagtgaccaggaagagggagaaacttctgctcagaccgagcgtgtgccactggacctcagtcctcgcctggaggagacgctggacttcggcgaggtggaagtggagcccagtgaggtggaagacttcgaggctcgtgggagccgcttctccaagtctgctgatgagagacagcgcatgctggtcgcagcgtaaggacgaactcctccagcaagctcgcaaacgtttcttgaacaaaagttctgaagatgatgcggcctcagagagcttcctcccctcggaaggtgcgtcctctgaccccgtgaccctgcgtcgaaggatgctggctgccgcgcggaacggaggcttcagaagcagcagacctcctagcgctcccttgccttcctcagctgcctcctgcgccctgtgcccgactgactggaggaggcctgtcccaattctgccgctccatggaaaagcgggcttgactgcattgccgctgtataaagcatgtggtcttatagtgtttggacagctgataaatttaatccttctttgtaatactttctatgtgacatttctcttccccttagaaacactgcaaattttaactgtaggtatgatctcttctggtgttgactggactgcttggggtgggggacgatcaggaggaagtgagccagtcgcctgcctgcagcaggcagcttctactcctgcctcatgcatacgtcccacaaatgcaggtgtcctgagcaccacacccagtgggaagagtgtgggggaggcgcacagtgtgagcccgcccccacgtcgtggggtaacatctgttatcaaactgctgtcgttgttgtggaagcatgtagactgtgccagagccagacccacgggctcatgcacccctgagcagcagggcatcttggaaaaggaactcttggttcgatacctggagcagaggaggggaaagtccagggctatagggtgtgatgaagtcacccctttctgtcccactacatctgggactgactttccgagcctccagtccaaagccggcttgatttccgtgaactctggtgctcctgcatctcatgagtgtgccccatgggtcccctcccctctcagcatttccttgtcccgtctggacctggggagtggttaggcagcaagctttggtttatggttttcattcattggtgaagtaaattaggcagtgctaaagcctgtgggtttggtccttgaacaagatgtgggccttgcaagatgggagagtaaaccttgaagggctttattaaagaaataaaaaagaacttttgtatcttttatcctgggagcactgcgttttcctagctgtgttattcctggtttaattcagcagagaaggtaaggtgtgaacctacctgccttggagaggcccaggtcccaaatctcttcaaattcttcacatgtttaactttaaggatttgaaccatgaagtcataggttacagacctcagttttatgccccattggattacttttttttttttttttttttttttactctttgaaagctttgttttgtggtagtcgcttttgggaagaatccagtattatctacaattattggcaaagtttaaatgtattttacataacggaaagtttttagaatgttgaaaagtaattgaaaaaggtgataggtaaatttttaggcaaagataatttatttcaataaatctttcaaaagccttaccttgaaatgctgttagtaaatttctgtgcattttttttttttaatttgttttgctgagagcatagctatttgtttttattgtaaacccgccc

SEQ ID NO: 195 - DNA, 393 bp, HUMAN
  misc_feature (1)..(393): N=any base
gcgaccgctctcctacccggacaccgacgtcattctcatgtgcttctcggtggacagcccggactcgctggagaacatccccgagaagtgggtccccgaggtgaagcacttctgtcccaatgtgcccatcatcctggtggccaacaanaaagacctgcgcaggacgagcatgtccgcacagagctggcccgcatgaagcaggaacccgtgcgcacggatgacggccgcgcatggccgtgcgcatccaagcctacgactacctcgagtgctctgccaagaccaaggaaggcgtgcgcgaggtcttcgagacggccacgcgcgccgnntgcaagaaagcgttacggctcccagaacggctgcatcaactgctgcaaggtgctatgagggccgcgc

SEQ ID NO: 196 - DNA, 477 bp, HUMAN
ttttcatagcagcttcttgtccagctttattgggaggccagcttgcctggaggggggccaggcatgaggtggggtaggagagcactgagaatactgtcccttttaagcaacctacaggggaagccctggagattgcaggacccaaggagctggcaggatggataggcaggtggacttggggtattgaggtctcaggcagccacggctgaaagttggtctgacctcagggtccaaatcccagaactcagagaacttgtccttaacggtgctccagtagtctttcagggaactgaagccatcggtcacccagcccctggctgcttgggcacctgggactcctgcacgctgctcagtgcatccttggcggtcttggtggcgtgcttcatgtagccctgcatgaagctgagaagggaggcatcctcggcctctgaagctcgggcagaggcaggagcgccaggagggcaacaacaaggagta

SEQ ID NO: 197 - DNA, 477 bp, HUMAN
  misc_feature (1)..(477): N=any base
tttttttcgcattcaacttaaatgcttttattgacaatgtcttggaacaataagcaaacaatgcttaaatttttcattcaaattcactttccacatgtcaaaagacctcaaggtagaaaaaaataaaataaaaatataaatatctgagaatccatcttaataaataaattaaaaacacaataaaacgttttcatggaaaactgttaatgtcagaacattcagaccacctcaacaatgcatgatcagtaacattacaatgaacattgatgttgaagaaaaactacagtacatggatatagctatttatttctatctaccagaaaataaagtcgtatcttttcttagtataatattgggtcatttctaatcagaacacactattgccaggaacacagtagttattgttaaaatcagccgcactagataccatttggaaatatccagcaccaggttaattcccataatgnaccccatagg

SEQ ID NO: 198 - DNA, 471 bp, HUMAN
  misc_feature (1)..(471): N=any base
nttttttcagttacacttttccttgctttaatatttgttgtctttttctgcttttgaaatgagctctcaattacaaaataccaaactacactcaaaagagggtgtagaaaaagccagccattggaccagcatggagaagcccacaagtaaggacagatagcagcagcaggtggcaagaggtgggaggtgactgaagcagtggttacaaatgttcacaggaagctaaaactatccaacaggttgtgccctaatgttagcacaggttagactagttactaccttgctaggtggcctcagtgtgttcagattctacgcagcaatacaatttcttccagttaagagttcttgacttgcaccgatcacagcatggttgaagggtactgggaccagtcttgttagtttttcaaaatgctgtcgtaganctggatagatgtattgagagacttcaggagctctacacttcagtgacag

SEQ ID NO: 199 - DNA, 249 bp, HUMAN
  misc_feature (1)..(249): N=any base
agcacattcaatccaatttggacttctctccagtaaacagtgcttctagtgaagaaaatgtgaagtactccagttctcagccagaaccccgcacaggtctttccttatgggataccagcccctcatacattgataaattggtacaagggatcagcttttcccagcccacatgtcctgatcatatgcttttgaatagtcagttacttggcaccccaggatcctcacagaancctgggacncggtgttggt

SEQ ID NO: 200 - DNA, 357 bp, HUMAN
  misc_feature (1)..(357): N=any base
ctctccttggaggacctttaggtaaactccctagtctccacctgagaccctgggagagaagtttgaagcacaactcccttaaggtctccaaaccagaccggtgacgcctgcgggaccatctggggcacctgcttccacccgtctctctgcccactcgggtctgcagaactggtttccaattgaggccctttgcaggatggaantacggggcttacaggagcttttgtgtgcctggtagaaactatttctgttccagtcacattgccatcactcttgtactgcctgccaccgcggaggaggctggtgacaggccaaagnaggttggaagaaacatcctttcatctcagagtccactgt

SEQ ID NO: 201 - DNA, 495 bp, HUMAN
  misc_feature (1)..(495): N=any base
gcgtggtgaccatcatcaaggggaaggtggaggaggtggagctcccagtggagaaggtggacatcatcatcagcgagtggatgggctactgctcttctacgagtccatgctcaacaccgtgctctatgcccgggacaagtggctggcgccgatggcctcatcttcccagaccgggccacgctgtatgtgacggccatcgaggaccggcagtacaaagactacaagatccactggtgggagaacgtgtatggcttcgacatgtcttgcatcaaagatgtggccattaaggagcccctagtggatgtcgtggaccccaaacagctggtcaccaacgccttgccttcataaaggaggttggacatctataccgtcaaggtggaagaccttgacctttcanctcccccgtttctgngccttgcaagttgaanccggaattgacttacgtgcacggccctggtgggctactttcaacatcgaggttnacacgctggcaaa

SEQ ID NO: 202 - DNA, 398 bp, HUMAN
  misc_feature (1)..(398): N=any base
gtgtaaaattgttaaccttgtaagatggataatgtgtataagaatgtaggccttaactatttcacatgagtcaaaacaaagcagctttaaaaaaataattggaagcacaagtgcatggcntgactgaatgctgttaatatttctaaaagtttccacantccagntaatatggcctgattcatagtaaaatacctctaataaacactgttttatagaaaacctgacttcagtgaatatttttgtattttacatgggccagtttatatactgctactttacactattatttcctatagctacatgttctttgtaccttttgtagttttatttgtattactagattcataccttgatggtaacgctctatctggttttgggtgtttttcatgttttagcat

SEQ ID NO: 203 - DNA, 426 bp, HUMAN
ttattttcaagattacatttaagctctagaatctcattccctttttctcttccaagagccagaagttcatcagttttggttttcaactctgtattcagccatgtattctgactatgtagcaattccttttcttgctccaagcgtttttctcgatacttaacagaaacatcagaagcttgaagttcatccaattttaactgaagttcaccctttgttgtattgctttctttaagtttttcattcagacgtttaacatcctctgttaagtattcaagttcttgagatagtctctcattgggttctaattaagtctcttttctcagcttctaattcttcctttgttcttgtaaattggctctgaatgggcaatattgcgatcctgaggcaatttcaagttctttgtttttctcaggtaggggccttcag

SEQ ID NO: 204 - DNA, 328 bp, HUMAN
  misc_feature (1)..(328): N=any base
aagtcttcctaaattttattggcactgaaatagaacatggattgagcataaaccactccaaaaacaattttttaaaaaacccaaaaagtacacaaaaaacccctgantacaaaatctaaccttttcccccagcctccctaagggtaagttactgactttaaggcagctattaatagattgccccacaattccagggnttcaatttaggccaatatagggacatatcaccaagtgaggctaattcacaggcaatgcacacaagactcctcaagggcanggccagagtgggggggttgttggcnggggggggatttgggggngggtttta

SEQ ID NO: 205 - DNA, 302 bp, HUMAN
  misc_feature (1)..(302): N=any base
gtaccntgatcaagtttattgcatgcctttcttttcctatttctttttttaagggttagtattaacaaatggcaatgagtagaaaagttaacatgaagattttagaaggagagaacttacaggacacagatttgtgattctttgactgtgacactattggatgtgattctaaaagcttttattgagcattgtcaaatttgtaagcttcataggggatgggncatccatatctataatgccccttcctatatggtgcctacccataggatgtggccattttttgncccttaatatccggnctt

SEQ ID NO: 206 - DNA, 229 bp, HUMAN
  misc_feature (1)..(229): N=any base
tttttttttttttttttttttttaccagggggngaaacaattttatttcacanttgtctttaaaaccacaagacacctatgttcttcanataaaaacattagtatagatacccatactttctagaaaatgattatacagaccctttcaaagaaaaatgtattccattatataggnttcagtgaggttgcttggggaaaaactcacatctggggctgattcctaaaacat

SEQ ID NO: 207 - DNA, 448 bp, HUMAN
  misc_feature (1)..(448): N=any base
ggatctggtctcccacaatgaaggtcttgcctccctggttctgggacagcagggtctcaaaaggcttcagttgcccgggcagtgcttcacatagtcatccttgcccgcctcatagttggtgtagatgagggagatgtatttgcagcggaggtcctccacgccgtcattcaccatgtccaccagggctgcctcctgctggtccttcccatagagcccaagggtgcgggcccagggtgacgcaggatggtattggactggtacagggtgaggtctccgtcctgggaacttnggggagctgcccgtattaggcanggaggcttttgagttgagccctccttncggccgcaagcttatttcccttttagttgagggttaantttaagtttggcaattggccttctttttaaaaacttcgtgatttgggaaaanctgggntttaaccaattta

SEQ ID NO: 208 - DNA, 488 bp, HUMAN
  misc_feature (1)..(488): N=any base
tttttttttgtgtgcaagtgtttatttggaatcccttctattttattagaaacagaaacagtaatttcaccagtaggaattgcgtgtgctctcaatacaagtaagtttgccactccttcaattgttgtccattgcagacactttggattcaaggttaagaatccaaatgagaaataagaaatatccggtccctgatgattcgtttaagtcctgttcaactcgatggaaagcttccacccgaaggaaggagttactgttcctcctgggctgggctttgtgtttctttcagtgctctaaaggaactttgtatttggggcagctgtgctctggtcatgtcagggctggctgggacagggagtttggatggcttacgggcggccgctggaccgggggctggctttttacttgaaggcttcactgggggtgttccattcaattcacaaagtggggcgttntgcaggccngtggaagggttttgcngggggntt

SEQ ID NO: 209 - DNA, 353 bp, HUMAN
  misc_feature (1)..(353): N=any base
ttttttttttgctttttataccactttattccaacctgagcacctcaatataaaactaaacactggtgaaccgttttcctaattctgcattatcataaatgtacaagttctcctagcagtccaacacttaaatagattaaatcatctctgacacatggtagctttcatataatgaaaatacctaaaataattagttgcaatatactgnaactggatcaaaataaaatggaactttgggnaagggngggctggcaggattgttacttaacatattggcaatactttatggttacaanttcgggggnccattgntttattttggggttctggccctggggggggccacctgtagg

SEQ ID NO: 210 - DNA, 487 bp, HUMAN
  misc_feature (1)..(487): N=any base
ggacagaatttcatnattattggataaatacatgcaggcactgtgcttggcctggggctccaagttagcagacgtggttcccaccttgagctcagtctttctgtgggggccactgcacaggcgtgatgggtcctgggagagggtntggagctagggcagggcagagctgnagaagacagcctccaagggtggggatntcacgggcccgtgcccctnttttatttttattttttccttgagacggagntcgnctgtgttgcccaggctggagtgcaatggcgcaatcttggctcactgcaacctccacctcccaggttcaagcaattctcctacctcaacctcctgagtagctggggactacagggtntgtgccaccacgcctgggattttgtatttttagtagagatggggttttcgccagggtggncttttaactcccgaccccangggatccaccctncttgggctcccaaagtgttgggattaa

SEQ ID NO: 211 - DNA, 384 bp, HUMAN
  misc_feature (1)..(384): N=any base
caagagtagattctnttnttcatttctcttttttttcttaaaaaaaaaagtattcatttggtataaaaaataaatattttaaatatgacattgantaaataaaaataatctgtcagtatgaaacatccccacagggtacattcatcaaagaggattttgtcacccaaggccatgtgcttttcagtggaagggaaggagggaaacctctaaggccgcacggtgggcccacggagctagcacgtgggcggggactganggctggatgcccggnttgagggtggggaactagagatgactntaagggcagggaacatctgtaccntctgcagggaaattgctaccctccccgggtgccngaggttccaccccacaaantttgtctac

SEQ ID NO: 212 - DNA, 409 bp, HUMAN
  misc_feature (1)..(409): N=any base
gggtaggaaaggtccccagaagcatgggggctgagtcagtcagcaaatgcataaggcctaggcacagaggagcaggttagggcacattcaccttntcaggattctgtggctccctcattggagaagggagagagcatcttgggggcgcaattccaagagcagcgagggcagaggttagagatggctgagagcccctaacctgaggcggcaccacantaggcagcaacaactntntggaaagctggatgaactggtcagtagcggaaantgggagggggcactgggttggcctnttggggaggggtccaaccttggcttggatgagctcatgagantacccagttttcccaagcagaggggggcagagcaaaagccctttttntgcaggcctcctttaaggagaaaaagg

SEQ ID NO: 213 - DNA, 289 bp, HUMAN
  misc_feature (1)..(289): N=any base
ttaacaggagacaggggttttattattactcaaatcagcctccctgaaaatttggaggctagggttttttaaaggtagtttggcgggcaggggttggaggtagagcaatgtcatttagcttgctcacttccatctgccagtttggnagcttcttggctganagatggcgccgggcatgcttggtcaaatggtcactcctcatgaaccgccggtcacacatggggcacgcaaatttcttctcacccgtgtgggttcgcctgtgtctggacagttcancagaacgggcaaa

SEQ ID NO: 214 - DNA, 399 bp, HUMAN
  misc_feature (1)..(399): N=any base
nnnnnagggaaaaaaaatggaaaatttattaattagacagtatgtgggcatcctgtnccacatgggaatgagaagatgctataggtnctctaagtattgcacagtctgaaaaaataacaaaaaaagggaaggggaggaaaaaaaaatcacatgatattggganccatctcacattatgantantctaccaagaaacatttaaaaaagaaanccctttgtttctacagtaggctttaagtttatagttcttgggantgactgtattccattgaaggacatctcaggtaacagggaaggctgttttaggcaatccccatgtggcaaatattaataaaanatatatanttttttgccaattcatctctngccttcaccccgggcaatcatgacatttncgag

SEQ ID NO: 215 - DNA, 447 bp, HUMAN
  misc_feature (1)..(447): N=any base
acctcagtctgacgacattgaagctagccgaatgaagcgagcagctgcaaagattctaatagaacgctactaccaccagttaactgagggctgtggaaatgaagcctgcacgaatgagttttgtgcttcctgtccaacttttcttcgtatggataataatgcagcagctattaaagccctcgagctttataagattaatgcaaaactctgtgatcctcatccctccaagaaaggagcaagctcagcttaccttgagaactcgaaagggtgcccccaacaactcctgctctgaggataaaaatgaacaagaaaggcgctagaattgattttaaagatgtgacttactttaacagaagngaagggtatatggaaattcttgaattatgtaggaggaaagagagggttatttcccctntaatccctgttctttgggaggagttttttcta

SEQ ID NO: 216 - DNA, 1460 bp, HUMAN
gcacacgggaagatatcagaaacatcctaggatcaggacaccccagatcttctcaactggaaccacgaaggctgtttcttccacacagcactttgatctccatttaagcaggcacctctgtcctgcgttccggagctgcgttcccgatggtcctcctttggctcacgctgctcctgatcgccctgccctgtctcctgcaaacgaaggaagatccaaacccaccaatcacgaacctaaggatgaaagcaaaggctcagcagttgacctgggaccttaacagaaatgtgaccgatatcgagtgtgttaaagatgccgactattctatgccggcagtgaacaatagctattgccagtttggagcaatttccttatgtgaagtgaccaactacaccgtccgagtggccaacccaccattctccacgtggatcctcttccctgagaacagtgggaagccttgggcaggtgcggagaatctgacctgctggattcatgacgtggatttcttgagctgcagctgggcggtaggcccgggggcccccgcggacgtccagtacgacctgtacttgaacgttgccaacaggcgtcaacagtacgagtgtcttcactacaaaacggatgctcagggaacacgtatcgggtgtcgtttcgatgacatctctcgactctccagcggttctcaaagttcccacatcctggtgcggggcaggagcgcagccttcggtatcccctgcacagataagtttgtcgtcttttcacagattgagatattaactccacccaacatgactgcaaagtgtaataagacacattcctttatgcactggaaaatgagaagtcatttcaatcgcaaatttcgctatgagcttcagatacaaaagagaatgcagcctgtaatcacagaacaggtcagagacagaacctccttccagctactcaatcctggaacgtacacagtacaaataagagcccgggaaagagtgtatgaattcttgagcgcctggagcaccccccagcgcttcgagtgcgaccaggaggagggcgcaaacacacgtgcctggcggacgtcgctgctgatcgcgctggggacgctgctggccctggtctgtgtcttcgtgatctgcagaaggtatctggtgatgcagagactctttccccgcatccctcacatgaaagaccccatcggtgacagcttccaaaacgacaagctggtggtctgggaggcgggcaaagccggcctggaggagtgtctggtgactgaagtacaggtcgtgcagaaaacttgagactggggttcagggcttgtgggggtctgcctcaatctccctggccgggccaggcgcctgcacagactggctgctggacctgcgcacgcagcccaggaatggacattcctaacgggtggtgggcatgggagatgcctgtgtaatttcgtccgaagctgccaggaagaagaacagaac

SEQ ID NO: 217 - DNA, 349 bp, HUMAN
atctgttgtcagcacagttttatttgctgtggaatccatgagagccggaagcatcgttggggccgtggctagcagagctcatggtgaccagtcctgggcctgaccaatgggtgattacatttaaaaaccaaaacaaaacaaaacaaaataccaagaacagatcacttgccatggacatcagtaatctattggtaatggtgaaaatttcatgaaaatttcccctaaaccataacaaaaactgtcctccttaccccaaaagtgctggagggaaagatggttgcatggctttgacctctctttgaacttgaaatgctaccttcctacccggaaaatgcggcacactatactt

SEQ ID NO: 218 - DNA, 1882 bp, HUMAN
tggcatcctggtcctctcacatggctccttaaaattggctgtggcttgttttttgtgatgtttgcttggttgcctgttcccttttctacctgcagagcacggttcccataagggcggcgagatcagcctcctgtctcatctggaagaccaccactctggggtctcagaggaatgatggaagccttggggtttctaaaattggaagtgaatggccccatggtgacggtggccctgtcagtggctctcttggccctcctgaaatggtactccacatcagcattctcaagactggagaagttaggcctcagacatcccaagccttctcctttcattggaaacttgacatttttccgccagggtttttgggaaagccaaatggagctcagaaagctgtatggacctctgtgtgggtactatcttggtcgtcggatgtttattgttatttctgagccagacatgatcaagcaggtgttggttgagaacttcagtaactttaccaacagaatggcgtcgggtttggagttcaagtcggtagccgacagcgttctgtttttacgtgacaaaagatgggaagaggtcagaggtgccctgatgtctgctttcagtcctgaaaagctgaacgagatggttcccctcatcagccaagcctgcgaccttctcctggctcatttaaaacgctatgcggaatctggggacgcatttgacatccagaggtgctactgcaattacaccacagatgtggttgccagcgtcccgtttggcaccccggtggactcctggcaggcccctgaggatccctttgtgaaacactgcaagcgtttcttcgaattctgcatccccagacctatcctggttttactcttatcatttccatccataatggtcccactggcccggattttgcccaataagaaccgagacgaactgaatggcttttttaacaaactcattaggaatgtgattgccttgcgggaccagcaagctgccgaagagaggcggagagacttcctccaaatggtcctggatgcccgacattctgcaagtcccatgggcgtgcaagactttgacatcgtcagagacgttttctcctctactgggtgcaagccgaacccttcccggcaacaccagcccagccctatggccaggcctttgactgtggatgagattgtgggccaggccttcatcttcctcatcgctggctatgaaatcatcaccaacacactttcttttgccacctacctactggccaccaaccctgactgccaagagaagcttctgagagaggtagacgtttttaaggagaaacacatggcccctgagttctgcagcctcgaggaaggcctgccctatctggacatggtgattgcagagacgctgaggatgtacccgccagctttcagattcacacgggaggcagctcaggactgcgaggtgctggggcagcgcatccccgcaggcgctgtgctagagatggccgtgggtgccctgcaccatgaccctgagcactggccaagcccggagaccttcaaccctgaaaggttcacggctgaggcccggcagcagcaccggcccttcacgtacctgcccttcggggccggcccacggagctgcctcggggtgcgtctagggctgcttgaggtcaagttgacactgctccacgtgctgcacaagttccggttccaagcctgccctgagacccaggtaccgctgcagctagaatccaaatctgccctaggtccaaaaaatggtgtctatatcaagatcgtatcccgctgacacagaaggctgccgggtggggggagggcacccccaaattcaaagaaaaccctaagtgtggatgttcagaattttggaaaaatgtcactgaagtgattgaaagccg

SEQ ID NO: 219 - DNA, 3397 bp, HUMAN
atggcggccttcagcaagtacttgacggcgcggaactcctcgctggctggtgccgcgttcctgctgctctgcctgctccacaagcggcgccgcgccctcggcctgcacggtaagaaaagtggaaaaccaccattacagaacaatgagaaagaggggaaaaaagagcgagctgtggtggacaaggtgtttttctcaaggctcatacagattctgaaaatcatggtccctagaacattttgtaaagagacaggttacttggtacttattgctgttatgctggtgtctcgaacatattgtgatgtttggatgattcaaaatgggacactaattgaaagtggtatcattggtcgtagcaggaaagatttcaagagatacttactcaacttcatcgctgccatgcctcttatctctctggttaataacttcttgaagtatgggttaaatgagcttaaactgtgcttccgagtaaggctcactaaatacctctatgaggagtatcttcaagctttcacatattataaaatggggaatctggacaacagaatagctaatccagaccagctgcttacacaagatgtagaaaaattttgtaacagtgtagtcgatctgtattcaaatcttagtaagccatttttagacatagttttgtatatctttaagttaacgagtgcaattggagctcagggcccagcgagcatgatggcctacttggttgtttctgggctattcctaactcgacttcgaagacccattggtaagatgacaataactgagcaaaagtatgaaggagaatatagatatgttaattctcggctcatcacaaacagtgaagaaattgccttttacaatgggaataaaagagaaaagcagacagtccactcagtcttccgaaaactggtggaacacctacataatttcattttgtttcggttttcaatgggcttcattgatagtattattgccaaataccttgccactgttgttggttacctagttgtcagtcgccctttcttagatttgtctcatcctcgacatctcaagagtacacattcggaacttctagaggattactaccaaagtggaagaatgcttttgcgaatgtctcaagctctgggtcgaatagttttggctgggcgtgaaatgactagattggccggttttactgctcggattacagaattaatgcaagtactgaaggatttaaatcatggcaaatatgagcgcacaatggtctcacaacaggaaaagggtattgaaggagtacaagtcattcccttgatacctggtgctggagaaatcattattgcagataacattataaagtttgatcatgttcctttagcaacgccaaatggagatgttttgatccgagaccttaattttgaagttcgatctggggctaatgttctaatttgtggtccaaatggctgcggaaagagttcacttttccgtgttcttggtgaattatggcctctttttggaggacgtctaactaaacctgaaagaggaaaattattttatgttcctcagagaccttacatgacccttggaacacttcgagatcaagtgatatatccagatggacgagaagatcagaaaaggaagggaatttctgacctagtactgaaggaatacttagacaatgtccagttgggtcatatccttgaacgtgaaggaggctgggacagtgttcaggattggatggacgtactcagtggtggagaaaagcaaagaatggcgatggcaagattattttatcataaaccccagtttgccattttggatgaatgcacaagtgcagttagtgtcgacgtggaaggctacatttatagtcattgtcgaaaggttggcatcactctcttcactgtgtctcataggaaatctctttggaaacatcatgagtactacctgcatatggatggcagaggcaactatgaattcaaacagataacagaagatacagttgagtttggctcttagagaaatctggagaactatacctgcttcagtgaaataattacagaatatacttagaaaggcaaagtacattgtaaaataaagttgagcttagttttttttaaaaaaaaaaaacaaagcaacaaattaactagatacagaataatggagaacaagttgttaaaacatttaatattatataggatattgctaattgtgtatatgttggtttaattaataatatgtactaagaatgtccttattcttgtggttaaaaacctgcctaaattaaattgggcttcaatcactgtaacctgattcatcctgggatgtaaaccattcgaagtcagctaattggacttttatggctctatcttttccttcagtgaagaaccctatttaaaactgggtcatcatttgtcctgttctagcaagatagtcttcagtttcattttcctgtgccctgtggtagttggaaacaaatcataatgtattatttaaatgtttaacatcattgcataacagcgtttattatacagtggcagatttctttagctgccacagtaatactcattccttgtgtgtgtcttggagtgcatttgactccaggaaaagccattttggttttccttaactaaatgataaatgtacccctctcagtctgcagtattgagttgtttaaagtatatgtgcagtcttgcttacaaggaggggttaccatgtatcacacctaatcttcccaatgtttgggatattaaaacacaaagtccttaacatgccaggctcaaggtcttataagagttctagatttttaagagaattagacaaatttgtgtgtgttagaagcccattcattagaagtgtggtggttatttggtattaaactccaaatgagccataggaaggcactacatgaaataatgcactgagtatgcaatgctatcactgtctttgactgtgattttatgtttaaaaagtatgttctaaaattattatatatacatgggtgaattatgtttccgaggcactgttttatctctgtgaatcttgaataacttttttatatttgggttatgatgtcaaacgatcctaagcgaagatgatttcagttcatcaaatcatcattaatgactttatgtattatttgcacagggagaattgaaactgagtataatcaataagctagatacgaaatcagtttctcaaactgagcttcagaaaggggcattttgtactcttgtttttgcataactggttttgtttttttgcagaattaactataacaatcactggctaccgaagtaaactgatgtactgaattccataatacataacattcaatttttaccacttctgtttagcgaacttgtatacttattttctgttcagattaaaaaaaaaaaaaaaaaaaactcagatatcctataaaaaaaaaaggaat

SEQ ID NO: 220 - DNA, 1543 bp, HUMAN
attccaggagcctatcaacccagataaagcgggacctcctctctggtagaggtgcagggggcagtactcaacatgatcacagagggagcgcaggcccctcgactgttgctgccgccgctgctcctgctgctcaccctgccagccacaggctcagaccccgtgctctgcttcacccagtatgaagaatcctccggcaagtgcaagggcctcctggggggtggtgtcagcgtggaagactgctgtctcaacactgcctttgcctaccagaaacgtagtggtgggctctgtcagccttgcaggtccccacgatggtccctgtggtccacatgggccccctgttcggtgacgtgctctgagggctcccagctgcggtaccggcgctgtgtgggctggaatgggcagtgctctggaaaggtggcacctgggaccctggagtggcagctccaggcctgtgaggaccagcagtgctgtcctgagatgggcggctggtctggctgggggccctgggagccttgctctgtcacctgctccaaagggacccggacccgcaggcgagcctgtaatcaccctgctcccaagtgcgggggccactgcccaggacaggcacaggaatcagaggcctgtgacacccagcaggtctgccccacacacggggcctgggccacctggggcccctggaccccctgctcagcctcctgccacggtggaccccacgaacctaaggagacacgaagccgcaagtgttccgcacctgagccctcccagaaacctcctgggaagccctgcccggggctagcctacgagcagcggaggtgcaccggcctgccaccctgcccagtggctgggggctgggggccttggggccctgtgagcccctgccctgtgacctgtggcctgggccagaccatggaacaacggacgtgcaatcaccctgtgccccagcatgggggccccttctgtgctggcgatgccacccggacccacatctgcaacacagctgtgccctgccctgtggatggggagtgggactcgtggggggagtggagcccctgtatccgacggaacatgaagtccatcagctgtcaagaaatcccgggccagcagtcacgcgggaggacctgcaggggccgcaagtttgacggacatcgatgtgccgggcaacagcaggatatccggcactgctacagcatccagcactgccccttgaaaggatcatggtcagagtggagtacctgggggctgtgcatgcccccctgtggacctaatcctacccgtgcccgccagcgcctctgcacacccttgctccccaagtacccgcccaccgtttccatggtcgaaggtcagggcgagaagaacgtgaccttctgggggagaccgctgccacggtgtgaggagctacaagggcagaagctggtggtggaggagaaacgaccatgtctacacgtgcctgcttgcaaagaccctgaggaagaggaactctaacacttctctcctccactctgagccccctgaccttccaaacctcaataaactagcctcttcg

SEQ ID NO: 221 - DNA, 1327 bp, HUMAN
gccgctgtgtaggaaagaagctaaagcacttccagagcctgtccggagctcagaggttcggaagacttatcgaccatggagcgcgcgtcctgcttgttgctgctgctgctgccgctggtgcacgtctctgcgaccacgccagaaccttgtgagctggacgatgaagatttccgctgcgtctgcaacttctccgaacctcagcccgactggtccgaagccttccagtgtgtgtctgcagtagaggtggagatccatgccggcggtctcaacctagagccgtttctaaagcgcgtcgatgcggacgccgacccgcggcagtatgctgacacggtcaaggctctccgcgtgcggcggctcacagtgggagccgcacaggttcctgctcagctactggtaggcgccctgcgtgtgctagcgtactcccgcctcaaggaactgacgctcgaggacctaaagataaccggcaccatgcctccgctgcctctggaagccacaggacttgcactttccagcttgcgcctacgcaacgtgtcgtgggcgacagggcgttcttggctcgccgagctgcagcagtggctcaagccaggcctcaaggtactgagcattgcccaagcacactcgcctgccttttcctgcgaacaggttcgcgccttcccggcccttaccagcctagacctgtctgacaatcctggactgggcgaacgcggactgatggcggctctctgtccccacaagttcccggccatccagaatctagcgctgcgcaacacaggaatggagacgcccacaggcgtgtgcgccgcactggcggcggcaggtgtgcagccccacagcctagacctcagccacaactcgctgcgcgccaccgtaaaccctagcgctccgagatgcatgtggtccagcgccctgaactccctcaatctgtcgttcgctgggctggaacaggtgcctaaaggactgccagccaagctcagagtgctcgatctcagctgcaacagactgaacagggcgccgcagcctgacgagctgcccgaggtggataacctgacactggacgggaatcccttcctggtccctggaactgccctcccccacgagggctcaatgaactccggcgtggtcccagcctgtgcacgttcgaccctgtcggtgggggtgtcgggaaccctggtgctgctccaaggggcccggggctttgcctaagatccaagacagaataatgaatggactcaaactgccttggcttcaggggagtcccgtcaggacgttgaggacttttcgaccaattcaaccctttgccccacctttattaaaatcttaaacaacg

SEQ ID NO: 222 - DNA, 3881 bp, HUMAN
gccgcctccgcctctctctttactgcggcgcggggcaaggtgtgcgggcgggaaggggcacgggcacccccgcggtccccgggaggctagagatcatggaagggaagtggttgctgtgtatgttactggtgcttggaactgctattgttgaggctcatgatggacatgatgatgatgtgattgatattgaggatgaccttgacgatgtcattgaagaggtagaagactcaaaaccagataccactgctcctccttcatctcccaaggttacttacaaagctccagttccaacaggggaagtatattttgctgattcttttgacagaggaactctgtcagggtggattttatccaaagccaagaaagacgataccgatgatgaaattgccaaatatgatggaaagtgggaggtagaggaaatgaaggagtcaaagcttccaggtgataaaggacttgtgttgatgtctcgggccaagcatcatgccatctctgctaaactgaacaagcccttcctgtttgacaccaagcctctcattgttcagtatgaggttaatttccaaaatggaatagaatgtggtggtgcctatgtgaaactgctttctaaaacaccagaactcaacctggatcagctccatgacaagaccccttatacgattatgtttggtccagataaatgtggagaggactataaactgcacttcatcttccgacacaaaaaccccaaaacgggtatctatgaagaaaaacatgctaagaggccagatgcagatctgaagacctattttactgataagaaaacacatctttacacactaatcttgaatccagataatagttttgaaatactggttgaccaatctgtggtgaatagtggaaatctgctcaatgacatgactcctcctgtaaatccttcacgtgaaattgaggacccagaagaccggaagcccgaggattgggatgaaagaccaaaaatcccagatccagaagctgtcaagccagatgactgggatgaagatgcccctgctaagattccagatgaagaggccacaaaacccgaaggctggttagatgatgagcctgagtacgtacctgatccagacgcagagaaacctgaggattgggatgaagacatggatggagaatgggaggctcctcagattgccaaccctagatgtgagtcagctcctggatgtggtgtctggcagcgacctgtgattgacaaccccaattataaaggcaaatggaagcctcctatgattgacaatcccagttaccagggaatctggaaacccaggaaaataccaaatccagatttctttgaagatctggaacctttcagaatgactccttttagtgctattggtttggagctgtggtccatgacctctgacattttttttgacaactttatcatttgtgctgatcgaagaatagttgatgattgggccaatgatggatggggcctgaagaaagctgctgatggggctgctgagccaggcgttgtggggcagatgatcgaggcagctgaagagcgcccgtggctgtgggtagtctatattctaactgtagcccttcctgtgttcctggttatcctcttctgctgttctggaaagaaacagaccagtggtatggagtataagaaaactgatgcacctcaaccggatgtgaaggaagaggaagaagagaaggaagaggaaaaggacaagggagatgaggaggaggaaggagaagagaaacttgaagagaaacagaaaagtgatgctgaagaagatggtggcactgtcagtcaagaggaggaagacagaaaacctaaagcagaggaggatgaaattttgaacagatcaccaagaaacagaaagccacgaagagagtgaaacaatcttaagagcttgatctgtgatttcttctccctcctcccctgcaagagtggtcctaggagaggacctggcacaccttaggttgacattcagaaaacttcaagacatcaccatcagcaggctccagttgaacactagtctgtgtaactttaaacatctagcagtaaatacttgcagttgtgatataaaggaccctgtttctgtagaaaagaaaacatttaacataatggttgtgaaatgtaacatgaagcaaactaacttttttttttttaacatctttgtttttaaaatagaatgatagaactttgccagtctttaagatcttggcttaatttaatgtattaatctgtttgtgcaaacataataccaccatttaaaaatgttagggagatgagttgcagtttttataatagattttttttaaagtttggtattgtaaaacattcacacctctgtccctcaaaattgataattacgtttaaagtgcagtcatttgtggttagaatcttgttttgtttgcttccattattgagttcctcctaaggaaattgaggagagggactgaatagaagcccaaattcatataaaagttgcgtttaagttgtattaaaaatagatatataagaaaaaattctttcacttgatgtttgttagaccagaaagtgtgtgtgttctgtagctcagttcccagacagctttttaggtagtggaggaggtggcttcatgtggcacttgggcatttatattccacttgggagggtcaggctgtggccttctggagcaggtggcttgttaaggaacgctagcagggcatggcacgtgagctccggaatagatgtcttcatcacttcttccactgtgtgttgacactgttttccttacctatttcctcagatccccagctttctcctctgctatgcattttcttcacagtgcagcttgcagtccgttgctgaaaatgattataagccctgcataatgttaagctttattgtgattacgtgtatgtttcttctttcttttaagcagacccatacctttccagggtcaaagtacagaatagaatacattgatacaaagtacagaaaaatactttgatttttatccatttcttttactctgtgtaaagacttgagaagtctaattcacaggcaaaccaatacagaattgactgcagttgaacagactagaagtatttgtgggaggagtgacatgaagcatgagttatctgattttttttgtagctgctatatattttaagccttcatttgcaattcatgtaacagttgtgtcataaattacacaataaagcagtcctgttcaaatttttttttaacgtggcttgtagaatttttaaaaaagtgatcttaggtttgttttttcatgcgggatgcagatgggtgctatcagagcctctcccacaccactatagtgtaataatgttattattactctacactgaaacgtattcagagttagatattattttagcttcagttgttctttagaggctttcaaatgtaccgatgatactgtttcttgcactgaatatataaacactccacagtgtttatattgggaagatattgggaaggaaatatatttgtaaaagatgaaggctgtatctatttttttttctttttaaagtttgttcacttaaattcttttgaggatgggatgtatttttcttgctgttcagtgctttttccttttcatctgttgttctgtggtcacagtgaccttagctacatagcagactttcccaaatgtattgattacaaataaacagttgttacttagcaagacctgaaaatatgtctgcaggtttctccttgaagcaaatgtgtgggatcattgcatttccagaaatctgcctccttcaccctccgttgacagtatatgtcatgcctcactttcttctagctgagctttaaatcattagagcttaaattgtcagatcgttcattgcctttccagggttatttagtaaagtttgttgaaaac

SEQ ID NO: 223 - DNA, 4519 bp, HUMAN
cagccagggccaccccaggggctataagagcaactagatttctggagcagctcggggatgggtgccatttgagcccagcttggctccccctcctggctggcctccttcctgcccttctgcctgcctgtgtctgctgagattctgcaaagaggaacgttggcaccatgtctctgctcaaccctgtcctgctgccccccaaggtgaaggcctatctgagccaaggggagcgcttcatcaaatgggatgatgaaactacagttgcctctccagttatcctccgtgtggatcctaagggctactacttatactggacgtatcaaagtaaggagatggagtttctggatatcaccagcatccgggatactcgctttgggaagtttgccaagatgcccaagagccagaagctccgggacgtcttcaacatggactttcctgataacagtttcctgctgaagacactcacggtggtgtccggcccggacatggtggacctcaccttccacaacttcgtctcctacaaggagaacgtgggcaaggcctgggctgaggacgtactggccctagtcaaacatccgctgacggccaacgcctcccgcagcaccttcctggacaagatccttgtgaagctcaagatgcagctcaactctgaagggaagattccggtgaagaactttttccagatgtttcctgctgaccgcaagcgggtggaagctgctctcagtgcctgccacctccccaaaggcaaaaatgacgccatcaatcctgaggacttcccagaacctgtctacaagagtttcctcatgagcctctgtcctcggccagaaatagatgagatcttcacttcttaccatgctaaggccaaaccctacatgacgaaggagcacctgaccaaattcatcaaccagaaacagcgggactcccggcttaactccctgctgttcccgccagcacggcctgaccaggtgcagggcctcatcgacaagtatgagcccagtggcatcaatgcacagaggggccagctgtcacctgaaggcatggtctggtttctctgtgggccagagaacagcgtgctggcccaggacaagctgctgctccaccacgacatgacgcagccactcaatcattacttcatcaactcgtcccacaacacctacctgacagccggccagttctcaggcctctcctcggctgagatgtaccgccaggtgctgctctctggctgccgttgcgtggagctagactgctggaaggggaaaccccctgacgaggagcccattatcacccatggcttcaccatgaccacagacatcttcttcaaagaagcaattgaggctattgcagaaagtgcctttaagacctccccctatcccatcatcctgtcgtttgagaaccatgtggactcaccccgccagcaggctaagatggctgagtattgccggacgatctttggggatatgctgctcacagagcccctggaaaagttcccactaaaaccaggtgtccccctgcccagccctgaggatctcaggggcaagatcctcatcaagaacaagaagaaccagttttctggccccacctcctccagtaaggataccggtggggaggctgagggcagcagcccacccagtgcccctgcagtgtgggctggcgaggaagggactgagctggaggaggaggaggtggaagaggaagaggaggaggagtcaggaaacctggatgaagaagagattaagaagatgcagtcggatgagggcacagcgggcctggaagtgacggcttatgaggagatgtccagcctagtcaattacatccagcccaccaagttcgtctcctttgagttctctgcccaaaagaaccgaagttatgtcatctcgtccttcacagagctcaaggcatatgacctgctctccaaggcctcggtgcagtttgtggactacaacaagcgccagatgagccgcatttaccccaagggaacccgcatggactcctccaactacatgccccagatgttctggaatgctggatgccagatggttgccctcaacttccagacgatggacttgcccatgcagcagaacatggcagtatttgagttcaacgggcagagcggctacctcctcaagcatgagttcatgcgccggccggacaagcagttcaaccccttctcagtggaccgcatcgacgtggtggtggccaccaccctttccattacggtgatctctgggcagttcctgtcagaacgcagcgtgcgcacctatgtagaagtggagctgtttggccttcctggggaccccaagaggcgctatcgaactaagctgtcacccagtactaactccatcaatcctgtctggaaggaggagccctttgtctttgagaagatcttgatgcctgagctggcctccctcagagtggctgtgatggaggaaggcaacaagtttcttggacaccgcatcatccccatcaatgccctaaattctgggtaccaccacctgtgcctgcacagtgagagcaacatgcccctcaccatgcctgcgctcttcatcttcctggagatgaaggactacatacctggtgcttgggcagatctcactgtggccctcgccaaccccattaagttcttcagtgcccatgacacgaagtctgtgaagctcaaggaggccatgggaggtctgcctgagaagcccttcccactggcgagtccagttgccagccaggtcaatggggcgttggccccaacgagcaatgggtcaccagcagccagggccggggccagggaagaggctatgaaagaagctgcggagccgcggaccgccagcctggaggagctccgggagctaaagggcgtggtgaagctgcagcggcggcacgagaaggagctgcgagagttggagcggcgcggagcgcggcgctgggaggagctgctgcagcggggcgcggcgcagctggcggagctcgggccaccgggcgtggggggcgtcggggcctgcaagctcggtcccggcaagggctctcgcaagaagaggagcctgccccgcgaggagagcgccggagccgcgccgggcgagggccctgagggcgtggacgggcgcgtgcgggagctgaaagacaggctggagctggagctgctgcggcagggcgaggagcagtacgagtgcgttctgaagcgcaaggagcagcacgtggccgagcaaatctccaaaatgatggagctggccagagagaaacaggcggcagagctgaaggccctgaaggagacgtcggagaacgacaccaaagagatgaagaaaaagctggagacaaagagactggagcggatccagggcatgaccaaagtcaccacagacaagatggcccaggagaggttgaagagagagattaacaactcccacatccaggaagtagtgcaggtgatcaagcagatgacggagaacttggagaggcaccaggagaagctggaggagaagcaggcggcttgcctggaacagatacgggagatggaaaagcagttccagaaggaggcgctggcagagtacgaggccaggatgaagggtctggaggcagaggtgaaggagtcggtgagggcctgcctcaggacctgctttccctccgaggccaaggacaagcctgagagggcctgcgagtgccccccagagctgtgtgagcaggacccactcatagcaaaggcagatgcccaggagagccgcctctgatgcccccatcccactgggacatttagcaaggaggttcagccccttctctgggatgtggttctattcccccaggaaaaaggagccccagccttctgaggctgtgggaacctgtggctgccttggacgctgcagccccctcctcaacggccaggccagagtctgagacaggacccaggcaccctcacggcagggcctctctggggcctagaagtcttctcaagctgacttcctacctccccctccatctctagataagtgtcatatatttgttgagggcaaaagactatggactggaaggcagaaagtgggatcctggccccactctgcctttcctattgagcaaccagctctgggctcagtttcctcacctggagggttggacccactcacctccactctagccccgaaccctcctgccccaggcttccaggccccatcaggcctgccctgagttggccttgtccactccttgaggcagatcctggcactacctcacagctccctggggacggccactccctggctgagggccctcccctcccctctgcctgtccggaacgggaggctgaaatggaaaagctgccttggccctgcttggctgagtcacaaggggcagtgggctcttgggtgctgttccaccctgaccctggctcacccctcttcctaggcctgggggcaggcagttcctaccatgtacccctctcaggctgcctgcctgacaaggtcagcatcatttgctctcctgaatttatgaggtttatttatttttctctttcctactcctattaaagaacctcgtcccagtgaaa

SEQ ID NO: 224 - DNA, 429 bp, HUMAN
  misc_feature (1)..(429): N=any base
caaaatggcaccacactgttttatttaaacctgcaaacaatataaagaggtaaggacttctgacgccaaaccatgcaagtaataacaaaggaacagagaannatattantaacaaaaagaaaatcattaaaaataaaaaaacaaagtacttcacatttcacagcagtgctttggcagtactggcangcatttctggtcaactgcttccnacagcaggaatatgaagaaacccccagatcttagcaaangtgtaacaacattttctccctgacagcttacattccaagtcattccatnccataccgctccactccacagttttatanacctgatcttaagatgtaactaggtactatgtgtgctcacaattaaaaacttaactaaanacaaatcagagggtagcagacaagtnaacaaagtttccagtaa

SEQ ID NO: 225 - DNA, 487 bp, HUMAN
  misc_feature (1)..(487): N=any base
gcgncncgagggtgngacaccttctcacaggggatcatgtactcgccctgaatcagcggcacggccccgatggccttctgcagctcgcgcacctcatccaccgggcccaccatgagggaagtgcctgtgtccacaatggcctcacagccctccttgcacagggtcagcccgctggccacctccacctggtccaggtggacctggccagtaggcttgcgggtgacattcaggtaggacagagaacccttgtaatacttggagtctgtgccacccagcatcagctcacccccaggctgcgcatctgggtccctgctcaggtagaaggagaagatgttctggtccaccagcttctgctgcatcaggttgtccgaagaggggcagcacnttgttgacggagatgcgggggtaggccatgcccaggatgccatcgaacttggctgcgatgaaggtgatgcctggctgcttggtggctcccaaagacctgcta

SEQ ID NO: 226 - DNA, 426 bp, HUMAN
  misc_feature (1)..(426): N=any base
gactttttagctgctcactggccccgnttgtntggccgactcatccgcccgcgacccctaatcccctctgcctgccccaagatgctgaagccagccctggagccccgagggtntcntccttcgagaactgccaaagaaatncatcattggaacgcgtcctcccggggntcaaggtccctcacgcacgcaagaccgggaccaccatcgcgggcntgggtgttccaagacggggtcattctgggcgccgatacgcgagccactaacgattcggtcgtgggcggacaaagagctgcgagaagntccacttcatcgcccccaaaatctaacttgctgtgggggctgggagtagccgcgggaagncgagnatgaaccacaaggatgggtgggcttccaagatggaagctaacaaggntttatctaaggggc

SEQ ID NO: 227 - DNA, 397 bp, HUMAN
  misc_feature (1)..(397): N=any base
ataactctgtcttcgtgagctggatggcaagctctcacactttacccgcagctgtgctgtgacttcccacacagtgtctgagcagaggcggcgtgggaccagaccctctcccacagccagcctggncaaggtggcacagaccagagctctgtgcagacaagcacccaggggtctaggaatgctcccttctctccaggggccagaggggagaaccaagctgctcagccttccttgctctggccagcaggaggcccttntcctgggagcagccctcgtttctgcctgtcatgcccgagggacacaagggccatccacttgtgcttcctgcttacatgggggcacttgcttggggatgttgcttcccacttcttgaggtnttcccccacccagggggcct

SEQ ID NO: 228 - DNA, 455 bp, HUMAN
  misc_feature (1)..(455): N=any base
ttgcattnatagattttattgtaaaacagagctgaagtcacaggaagtagggaactttgcacccaacatatacagcattcattcgctgagtacctgccaagagcgaggctaggtgcttggccctgcaggaccntgagacatatacgagtcatgtttcctgctctgcnagctcccagcccggtggggagacaggcagaggcacagcatctttcatacaagtntccaagtgccagaagctctacaatgtcaaggagcaatttattccttcagcagaggaagaaagaacccccaggngccacatttgctcagagccttgggagctgagaaacttctgataggaggtaaagtactgcaggcagctgtaaaaaatctgggagtgggagatgggagcttnggaggctgggcagcagtgcctgggacagagggantccagnttttggaagtgttttaaaagg

SEQ ID NO: 229 - DNA, 3632 bp, HUMAN
aaagagctggaggcgcgcaggccggctccgctccggccccggacgatgcggcgcgcccaggatgctgccgtgcctcgtagtgctgctggcggcgctcctcagcctccgtcttggctcagacgctcatgggacagagctgcccagccctccgtctgtgtggtttgaagcagaatttttccaccacatcctccactggacacccatcccaaatcagtctgaaagtacctgctatgaagtggcgctcctgaggtatggaatagagtcctggaactccatctccaactgtagccagaccctgtcctatgaccttaccgcagtgaccttggacctgtaccacagcaatggctaccgggccagagtgcgggctgtggacggcagccggcactccaactggaccgtcaccaacacccgcttctctgtggatgaagtgactctgacagttggcagtgtgaacctagagatccacaatggcttcatcctcgggaagattcagctacccaggcccaagatggcccccgcgaatgacacatatgaaagcatcttcagtcacttccgagagtatgagattgccattcgcaaggtgccgggaaacttcacgttcacacacaagaaagtaaaacatgaaaacttcagcctcctaacctctggagaagtgggagagttctgtgtccaggtgaaaccatctgtcgcttcccgaagtaacaaggggatgtggtctaaagaggagtgcatctccctcaccaggcagtatttcaccgtgaccaacgtcatcatcttctttgcctttgtcctgctgctctccggagccctcgcctactgcctggccctccagctgtatgtgcggcgccgaaagaagctacccagtgtcctgctcttcaagaagcccagccccttcatcttcatcagccagcgtccctccccagagacccaagacaccatccacccgcttgatgaggaggcctttttgaaggtgtccccagagctgaagaacttggacctgcacggcagcacagacagtggctttggcagcaccaagccatccctgcagactgaagagccccagttcctcctccctgaccctcacccccaggctgacagaacgctgggaaacggggagccccctgtgctgggggacagctgcagtagtggcagcagcaatagcacagacagcgggatctgcctgcaggagcccagcctgagccccagcacagggcccacctgggagcaacaggtggggagcaacagcaggggccaggatgacagtggcattgacttagttcaaaactctgagggccgggctggggacacacagggtggctcggccttgggccaccacagtcccccggagcctgaggtgcctggggaagaagacccagctgctgtggcattccagggttacctgaggcagaccagatgtgctgaagagaaggcaaccaagacaggctgcctggaggaagaatcgcccttgacagatggccttggccccaaattcgggagatgcctggttgatgaggcaggcttgcatccaccagccctggccaagggctatttgaaacaggatcctctagaaatgactctggcttcctcaggggccccaacgggacagtggaaccagcccactgaggaatggtcactcctggccttgagcagctgcagtgacctgggaatatctgactggagctttgcccatgaccttgcccctctaggctgtgtggcagccccaggtggtctcctgggcagctttaactcagacctggtcaccctgcccctcatctctagcctgcagtcaagtgagtgactcgggctgagaggctgcttttgattttagccatgcctgctcctctgcctggaccaggaggagggccctggggcagaagttaggcacgaggcagtctgggcacttttctgcaagtccactggggctggcccagccaggctgcagggctggtcagggtgtctggggcaggaggaggccaactcactgaactagtgcagggtatgtgggtggcactgacctgttctgttgactggggccctgcagactctggcagagctgagaagggcagggaccttctccctcctaggaactctttcctgtatcataaaggattatttgctcaggggaaccatggggctttctggagttgtggtgaggccaccaggctgaagtcagctcagacccagacctccctgcttaggccactcgagcatcagagcttccagcaggaggaagggctgtaggaatggaagcttcagggccttgctgctggggtcatttttaggggaaaaaggaggatatgatggtcacatggggaacctcccctcatcgggcctctggggcaggaagcttgtcactggaagatcttaaggtatatattttctggacactcaaacacatcataatggattcactgaggggagacaaagggagccgagaccctggatggggcttccagctcagaacccatccctctggtgggtacctctggcacccatctgcaaatatctccctctctccaacaaatggagtagcatccccctggggcacttgctgaggccaagccactcacatcctcactttgctgccccaccatcttgctgacaacttccagagaagccatggttttttgtattggtcataactcagccctttgggcggcctctgggcttgggcaccagctcatgccagccccagagggtcagggttggaggcctgtgcttgtgtttgctgctaatgtccagctacagacccagaggataagccactgggcactgggctggggtccctgccttgttggtgttcagctgtgtgattttggactagccacttgtcagagggcctcaatctcccatctgtgaaataaggactccacctttaggggaccctccatgtttgctgggtattagccaagctggtcctgggagaatgcagatactgtccgtggactaccaagctggcttgtttcttatgccagaggctaacagatccaatgggagtccatggtgtcatgccaagacagtatcagacacagccccagaagggggcattatgggccctgcctccccataggccatttggactctgccttcaaacaaaggcagttcagtccacaggcatggaagctgtgaggggacaggcctgtgcgtgccatccagagtcatctcagccctgcctttctctggagcattctgaaaacagatattctggcccagggaatccagccatgacccccacccctctgccaaagtactcttaggtgccagtctggtaactgaactccctctggaggcaggcttgagggaggattcctcagggttcccttgaaagctttatttatttattttgttcatttatttattggagaggcagcattgcacagtgaaagaattctggatatctcaggagccccgaaattctagctctgactttgctgtttccagtggtatgaccttggagaagtcacttatcctcttggagcctcagtttcctcatctgcagaataatgactgacttgtctaattcatagggatgtgaggttctgctgaggaaatgggtatgaatgtgccttgaacacaaagctctgtcaataagtgatacatgttttttattccaataaattgtcaagaccaca

SEQ ID NO: 230 - DNA, 4839 bp, HUMAN
atgtcggcgggcggccgtgacgaggagcggcggaagctggccgacatcatccaccactggaacgccaaccggctggacctgttcgagatcagccagccgaccgaggatttggagttccatggagtgatgagattttattttcaagataaagctgctggaaactttgcaacaaaatgtattcgggtctctagtactgccaccactcaagatgtaatcgaaacgctcgcggagaaatttcgacctgatatgcgaatgctgtcctctcccaagtattcactctatgaagtgcatgtcagcggagaaagaagattggatatagatgagaaacctctagttgtacaactgaattggaacaaagatgatcgggaaggcagatttgttcttaagaatgagaatgacgccattcctcctaaggctcaaagtaatggacctgaaaagcaggaaaaagaaggggttatccagaacttcaagagaactctctcaaagaaagaaaagaaggaaaaaaagaagagagaaaaagaggcattgcgacaggcatctgataaagatgatagacctttccaaggggaggatgttgaaaattctcgactggctgctgaggtttacaaagacatgccggaaaccagctttactcgaaccatttctaatcctgaggtggttatgaaacgacggaggcagcaaaaattggaaaagagaatgcaggaatttcggagctcagatgggcggcctgattcaggtggaacattgagaatttatgcagatagtttaaaaccaaatattccctacaagacaatcctgctgtctactacagatcctgcagactttgctgtggctgaagctttagagaagtatggtctggaaaaagaaaaccctaaggattactgcatcgcccgggttatgcttcctcctggagcccagcattctgatgaaaagggtgctaaagaaattattcttgatgatgatgagtgtcctttacaaatcttcagggaatggccaagtgacaaagggattttagtctttcagttgaagaggaggccaccagaccacatcccaaagaaaaccaagaaacacttggaaggcaagacacccaagggaaaggagagagctgacgggtctgtctatggctccacccttcctccggagaagctgccctatttagtagagttaagcccagatggttctgactctagagataagccaaagctttaccgccttcagttaagtgttactgaagttgggacagaaaagttggatgacaactctatccagttgtttggcccaggaattcagccccatcactgtgaccttaccaacatggatggagtggtcactgtgacgcccagaagtatggacgcagaaacctacgtggaaggccagcgcatctcagaaaccaccatgctgcagagtggcatgaaagtgcagtttggggcgtcccatgtatttaagtttgtggaccccagtcaggatcatgctcttgcaaaaagatctgtggatggaggcctgatggttaagggcccaagacataaacctggaattgttcaggagacaacttttgatttgggaggagatattcatagtgggacagcattaccgacaagcaagagcaccactaggctggacagcgacagagtgtcgtctgcctctagcacagccgagcggggaatggtgaagccgatgatcagagtagaacagcagccagattatcgcaggcaagaaagcagaacacaggatgcttctgggcctgagctgatactacctgcaagcattgaattcagggaaagttctgaagattcatttttgtctgccattataaattatactaatagctctacagtccactttaagttgtcccctacatatgtattatatatggcatgccggtatgtattgtccaaccagtacagacctgacatcagccctacagagcgcacacataaagtcattgcagtcgtcaacaagatggtgagcatgatggagggtgtcatccagaaacagaagaatattgcaggggcacttgccttctggatggcaaatgcatctgaacttctcaacttcattaagcaagaccgagaccttagtcggatcacactggatgctcaagatgttttagcacatttggttcaaatggcatttaaatacttggttcactgtcttcaatcagaacttaataattacatgccagcctttctagatgaccctgaagagaacagtctgcaacgaccaaaaatagatgatgtgctgcacacgctcacaggagccatgtccttgctacgacgctgcagagtcaatgccgccctgaccatccagctcttctctcagctcttccacttcatcaatatgtggctgttcaatagattggtgaccgacccagattcggggctgtgctcccattactggggtgcgattatccgtcagcagttgggccatattgaagcctgggctgagaagcaggggctggaactggctgcggactgtcatctgagcaggatcgtgcaggcaacgactttgcttaccatggataagtatgcacctgatgacattccaaatataaacagcacctgctttaagttaaattcattacaacttcaagccttattacagaactatcactgtgcacctgatgagccttttatcccaacggatcttatagaaaatgtagtgactgtggctgaaaacactgccgatgagctggcccgcagtgatggaagggaagtgcagttggaggaggatcctgatctgcagctgccgtttcttttgccagaagatggttattcttgtgatgttgtcagaaacattccaaatggtttacaagaatttttagaccctctgtgccagagaggattttgcaggttaattcctcacacacgttcaccaggtacttggacaatatattttgaaggtgcagattatgaaagtcaccttctgcgtgagaacacagagctggctcagcctctgaggaaagaacctgaaataatcactgtgaccctaaaaaagcagaatggaatgggccttagcattgttgcagcaaagggtgctggtcaagataaactaggaatctacgtgaagtcggttgtgaaaggaggtgctgcagatgtggatggacgtctagctgcaggtgatcagctcctcagtgtggatggacgaagtctggttggactctctcaggaaagggcggcagaactcatgacaagaacaagctctgtggtgacactggaagtagcaaagcagggtgccatctaccacggtctggccacccttctcaatcagccatcccccatgatgcagagaatttcagatcgtcgtggctcaggtaaaccccgaccaaagagtgaaggctttgagctctataataattcaactcaaaatgggtctcctgagagtcctcagctgccttgggcagaatatagtgaaccaaagaaattgcctggtgatgacagactgatgaaaaatagagctgatcaccgttccagccccaacgtagcaaatcagcctcctagtcctggagggaaaagtgcatatgcctctggaacaacagcgaagataacatctgtctctactggaaacctctgcactgaggagcagacgcctccgcctagacctgaagcctaccccattcccactcagacgtacaccagagagtattttaccttcccagcttccaaatcccaggatcggatggctcctcctcagaaccagtggccaaattatgaggaaaagccacatatgcacacagatagtaatcattccagtattgcaattcagcgtgttacacgttcccaagaagaacttcgagaagataaagcttaccaacttgagcggcatcgaatagaggcagctatggaccgaaagtctgatagtgatatgtggataaatcagagctcctcactggactccagtacctctagccaggagcatctgaaccattcctctaagtcggtcacccctgcttccacactgaccaaaagtggccctggccgttggaaaacaccagcagccataccggccacccctgtggccgtctcccagccaatccgaacagacctgcctccgccacccccgccacctccagtccactatgccggtgatttcgatggaatgtccatggatttgcctctcccaccacccccttccgccaaccagatagggctgccgtctgcgcaggtggctgctgctgaacggagaaagagagaagaacatcagcgttggtatgagaaggagaaggcccccctggaggaggagcgggagaggaagcggagagagcaggagaggaagttgggccagatgcgcactcagtccttaaaccctgctccgttttctcccctgactgcacagcagatgaagcccgaaaagccttccacactccagcggccacaggaaacagtcattcgggagctgcagcctcagcagcagccccgcacgatcgagcgcagagacttgcagtacattacagtcagcaaagaggagctttcctcgggggacagtctgtcccccgacccgtggaagcgggacgccaaggagaagctggagaagcagcagcagatgcacatcgtggacatgctgagcaaggagatccaggagctccagagcaaaccggaccgcagcgccgaggagagcgaccggctgcgcaagctcatgctggagtggcagttccagaagagactccaggagtcgaagcagaaggacgaagatgacgaggaggaggaggacgatgatgtggacaccatgctgatcatgcagcgcctggaggctgaacgaagagcgagggtaaaggggggagtgctttggctgtgcccatctgtggtccctattttagcttctgcgtgtttcccatggggatag

SEQ ID NO: 231 - DNA, 2947 bp, HUMAN
ggcgggaaacagcttagtgggtgtggggtcgcgcattttcttcaaccaggaggtgaggaggtttcgacatggcggtgcagccgaaggagacgctgcagttggagagcgcggccgaggtcggcttcgtgcgcttctttcagggcatgccggagaagccgaccaccacagtgcgccttttcgaccggggcgacttctatacggcgcacggcgaggacgcgctgctggccgcccgggaggtgttcaagacccagggggtgatcaagtacatggggccggcaggagcaaagaatctgcagagtgttgtgcttagtaaaatgaattttgaatcttttgtaaaagatcttcttctggttcgtcagtatagagttgaagtttataagaatagagctggaaataaggcatccaaggagaatgattggtatttggcatataaggcttctcctggcaatctctctcagtttgaagacattctctttggtaacaatgatatgtcagcttccattggtgttgtgggtgttaaaatgtccgcagttgatggccagagacaggttggagttgggtatgtggattccatacagaggaaactaggactgtgtgaattccctgataatgatcagttctccaatcttgaggctctcctcatccagattggaccaaaggaatgtgttttacccggaggagagactgctggagacatggggaaactgagacagataattcaaagaggaggaattctgatcacagaaagaaaaaaagctgacttttccacaaaagacatttatcaggacctcaaccggttgttgaaaggcaaaaagggagagcagatgaatagtgctgtattgccagaaatggagaatcaggttgcagtttcatcactgtctgcggtaatcaagtttttagaactcttatcagatgattccaactttggacagtttgaactgactacttttgacttcagccagtatatgaaattggatattgcagcagtcagagcccttaacctttttcagggttctgttgaagataccactggctctcagtctctggctgccttgctgaataagtgtaaaacccctcaaggacaaagacttgttaaccagtggattaagcagcctctcatggataagaacagaatagaggagagattgaatttagtggaagcttttgtagaagatgcagaattgaggcagactttacaagaagatttacttcgtcgattcccagatcttaaccgacttgccaagaagtttcaaagacaagcagcaaacttacaagattgttaccgactctatcagggtataaatcaactacctaatgttatacaggctctggaaaaacatgaaggaaaacaccagaaattattgttggcagtttttgtgactcctcttactgatcttcgttctgacttctccaagtttcaggaaatgatagaaacaactttagatatggatcaggtggaaaaccatgaattccttgtaaaaccttcatttgatcctaatctcagtgaattaagagaaataatgaatgacttggaaaagaagatgcagtcaacattaataagtgcagccagagatcttggcttggaccctggcaaacagattaaactggattccagtgcacagtttggatattactttcgtgtaacctgtaaggaagaaaaagtccttcgtaacaataaaaactttagtactgtagatatccagaagaatggtgttaaatttaccaacagcaaattgacttctttaaatgaagagtataccaaaaataaaacagaatatgaagaagcccaggatgccattgttaaagaaattgtcaatatttcttcaggctatgtagaaccaatgcagacactcaatgatgtgttagctcagctagatgctgttgtcagctttgctcacgtgtcaaatggagcacctgttccatatgtacgaccagccattttggagaaaggacaaggaagaattatattaaaagcatccaggcatgcttgtgttgaagttcaagatgaaattgcatttattcctaatgacgtatactttgaaaaagataaacagatgttccacatcattactggccccaatatgggaggtaaatcaacatatattcgacaaactggggtgatagtactcatggcccaaattgggtgttttgtgccatgtgagtcagcagaagtgtccattgtggactgcatcttagcccgagtaggggctggtgacagtcaattgaaaggagtctccacgttcatggctgaaatgttggaaactgcttctatcctcaggtctgcaaccaaagattcattaataatcatagatgaattgggaagaggaacttctacctacgatggatttgggttagcatgggctatatcagaatacattgcaacaaagattggtgctttttgcatgtttgcaacccattttcatgaacttactgccttggccaatcagataccaactgttaataatctacatgtcacagcactcaccactgaagagaccttaactatgctttatcaggtgaagaaaggtgtctgtgatcaaagttttgggattcatgttgcagagcttgctaatttccctaagcatgtaatagagtgtgctaaacagaaagccctggaacttgaggagtttcagtatattggagaatcgcaaggatatgatatcatggaaccagcagcaaagaagtgctatctggaaagagagcaaggtgaaaaaattattcaggagttcctgtccaaggtgaaacaaatgccctttactgaaatgtcagaagaaaacatcacaataaagttaaaacagctaaaagctgaagtaatagcaaagaataatagctttgtaaatgaaatcatttcacgaataaaagttactacgtgaaaaatcccagtaatggaatgaaggtaatattgataagctattgtctgtaatagttttatattgttttatattaa

SEQ ID NO: 232 - DNA, 279 bp, HUMAN
atgaagctctgcgtgtctgccttctctctcctcctgcttgtggccgccttctgcgattcagtgctgtcagcaccaataggctctgaccctcccacttcctgctgcttctcttacacctcccggaagattcatcggaactttgtgatggattactatgagaccagcagcctttgctcccagccagctgtggtatttctgaccaaaaaaggcaggcaaatctgtgccgaccccagcgagccctgggtcaatgagtatgtgaatgacttggagttgaactga

SEQ ID NO: 233 - DNA, 2109 bp, HUMAN
tcctcctctcctgaccgtattctaggatcctctctgctcttacctcctgccattccaaggcctccttctgaacctggcctcaacccagtcccaagtttgcaccgcccgaggcaggataggggtccctccattttgatttcctaaagagaataagactggctagttcagaaccctaagtccagggcagcccaatcagcagtggaagaggctccacagcagtgggcctgaccaccttcccctctcctaggtgcaggcggagctgaggcggaagtggcggcgctggcacctgcagggcgtcctgggctggaaccccaaataccggcacccgtcgggaggcagcaacggcgccacgtgcagcacgcaggtttccatgctgacccgcgtcagcccaggtgcccgccgctcctccagcttccaagccgaagtctccctggtctgaccaccaggatcccaggggcccaaggcggcccctcccgccccttcccactcaccccggcagacgccggggacagaggcctgcccgggcgcggccagccccggccctgggctcggaggctgcccccggccccctggtctctggtccggacactcctagagaacgcagccctagagcctgcctggagcgtttctagcaagtgagagagatgggagctcctctcctggaggattgcaggtggaactcagtcattagactcctcctccaaaggccccctacgccaatcaagggcaaaaagtctacatactttcatcctgactctgccccctgctggctcttctgcccaattggaggaaagcaaccggtggatcctcaaacaacactggtgtgacctgagggcagaaaggttctgcccggggaaggtcaccagcaccaacaccacggtagtgcctgaaatttcaccattgctgtcaagttcctttgggttaagcattaccactcaggcatttgactgaagatgcagctcactaccctattctctctttacgcttagttatcagctttttaaagtgggttattctggagtttttgtttggagagcacacctatcttagtggttccccaccgaagtggactggcccctgggtcagtctggtgggaggacggtgcaacccaaggactgagggactctgaagcctctgggaaatgagaaggcagccaccagcgaatgctaggtctcggactaagcctacctgctctccaagtctcagtggcttcatctgtcaagtgggatctgtcacaccagccatacttatctctctgtgctgtggaagcaacaggaatcaagagctgccctccttgtccacccacctatgtgccaactgttgtaactaggctcagagatgtgcacccatgggctctgacagaaagcagatacctcaccctgctacacatacaggatttgaactcagatctgtctgataggaatgtgaaagcacggactcttactgctaacttttgtgtatcgtaaccagccagatcctcttggttatttgtttaccacttgtattattaatgccattatcctgaattccccttgccaccccaccctccctggcgtgtggctgaggaggcctccatctcatgtatcatctggataggagcctgctggtcacagcctcctctgtctgcccttcaccccagtggccactcagcttcctacccacacctctgccagaagatcccctcaggactgcaacaggcttgtgcaacaataaatgttggcttggattggcttggttcccctggtggttgatattctcaatatggcctaaaatgggaccagcttccaacttggagccatcttcctccacccaaaggatgggtgatctaatacattactgaaaccagatgcctcaactcttttggcttttgacagaaatccatattttcatatgaggcattcacagttctgagggccttcagctcccatctttttgagtggtatcctctctcctctgagtgtgatgaagaccaggtccccattgtgtccccccactgcatatgtatggacccactccagatggcacggggacggggggagtaggaaaagtggcatggtgagcagagccctggctatcaggtggcagatggcagagttggaaggaatcttg

SEQ ID NO: 234 - DNA, 1820 bp, HUMAN
gagctccaagctggtttgaacaagccctgggcatgtttggcgggaagttggcttagctcggctacctgtggccccgcagttttgtagtccccgccttgtttctccccagaggcctctcaatcctccctccatgatcttcgcatagagcacagtaccccttcacacggaggacgcgatggctcccaagaaacgcccagaaacccagaagacctccgagattgtattacgccccaggaacaagaggagcaggagtcccctggagctggagcccgaggccaagaagctctgtgcgaagggctccggtcctagcagaagatgtgactcagactgcctctgggtggggctggctggcccacagatcctgccaccatgccgcagcatcgtcaggaccctccaccagcataagctgggcagagcttcctggccatctgtccagcaggggctccagcagtcctttttgcacactctggattcttaccggatattacaaaaggctgccccctttgacaggagggctacatccttggcgtggcacccaactcaccccagcaccgtggctgtgggttccaaagggggagatatcatgctctggaattttggcatcaaggacaaacccaccttcatcaaagggattggagctggagggagcatcactgggctgaagtttaaccctctcaataccaaccagttttacgcctcctcaatggagggaacaactaggctgcaagactttaaaggcaacattctacgagtttttgccagctcagacaccatcaacatctggttttgtagcctggatgtgtctgctagtagccgaatggtggtcacaggagacaacgtggggaacgtgatcctgctgaacatggacggcaaagagctttggaatctcagaatgcacaaaaagaaagtgacgcatgtggccctgaacccatgctgtgattggttcctggccacagcctccgtagatcaaacagtgaaaatttgggacctgcgccaggttagagggaaagccagcttcctctactcgctgccgcacaggcatcctgtcaacgcagcttgtttcagtcccgatggagcccggctcctgaccacggaccagaagagcgagatccgagtttactctgcttcccagtgggactgccccctgggcctgatcccgcaccctcaccgtcacttccagcacctcacacccatcaaggcagcctggcatcctcgctacaacctcattgttgtgggccgatacccagatcctaatttcaaaagttgtaccccttatgaattgaggacgatcgacgtgttcgatggaaactcagggaagatgatgtgtcagctctatgacccagaatcttctggcatcagttcgcttaatgaattcaatcccatgggggacacgctggcctctgcaatgggttaccacattctcatctggagccaggaggaagccaggacacggaagtgagagacactaaagaaggtgtgggccagacaaggccttggagcccacacatgggatcaagtcctgcaagcagaggtggtgatttgttaaagggccaaaagtatccaaggttagggttggagcaggggtgctgggacctggggcactgtgggactgggacacttttatgttaatgctctggacttgcctccagagactgctccagagttggtgacacagctgtcccaagggcccctctgtatctagcctggaaccaaggttatcttggaactaaatgacttttctcctctcagtgggtggtagcagagggatcaagcagttatttgatttgtgctcttttgatatggccaataaaaccataccg

SEQ ID NO: 235 - DNA, 1077 bp, HUMAN
aattcggcacgagggactttgaacatgtcggggatcgccctcagcagactcgcccaggagaggaaagcatggaggaaagaccacccatttggtttcgtggctgtcccaacaaaaaatcccgatggcacgatgaacctcatgaactgggagtgcgccattccaggaaagaaagggactccgtgggaaggaggcttgtttaaactacggatgcttttcaaagatgattatccatcttcgccaccaaaatgtaaattcgaaccaccattatttcacccgaatgtgtacccttcggggacagtgtgcctgtccatcttagaggaggacaaggactggaggccagccatcacaatcaaacagatcctattaggaatacaggaacttctaaatgaaccaaatatccaagacccagctcaagcagaggcctacacgatttactgccaaaacagagtggagtacgagaaaagggtccgagcacaagccaagaagtttgcgccctcataagcagcgaccttgtggcatcgtcaaaaggaagggattggtttggcaagaacttgtttacaacatttttgcaaatctaaagttgctccatacaatgactagtcacctgggggggttgggcgggcgccatcttccattgccgccgcgggtgtgcggtctcgattcgctgaattgcccgtttccatacagggtctcttccttcggtcttttgtatttttgattgttatgtaaaactcgcttttattttaatattgatgtcagtatttcaactgctgtaaaattataaacttttatacttgggtaagtcccccagggcgagttcctcgctctgggatgcaggcatgcttctcaccgtgcagagctgcacttggcctcagctggctgtatggaaatgcaccctccctcctgccgctcctctctagaaccttctagaacctgggctgtgctgcttttgagcctcagaccccagggcagcatctcggttctgcgccacttcctttgtgttatatggcgttttgtctgtgttgctgtttagagtaaataaactgtttatataaaaaaaaaaaaaaaaaaactcga

SEQ ID NO: 236 - DNA, 2569 bp, HUMAN
tccctcgtctctctcgggcaacatggcgggcgtggaggaggtagcggcctccgggagccacctgaatggcgacctggatccagacgacagggaagaaggagctgcctctacggctgaggaagcagccaagaaaaaaagacgaaagaagaagaagagcaaagggccttctgcagcaggggaacaggaacctgataaagaatcaggagcctcagtggatgaagtagcaagacagttggaaagatcagcattggaagataaagaaagagatgaagatgatgaagatggagatggcgatggagatggagcaactggaaagaagaagaaaaagaagaagaagaagagaggaccaaaagttcaaacagaccctccctcagttccaatatgtgacctgtatcctaatggtgtatttcccaaaggacaagaatgcgaatacccacccacacaagatgggcgaacagctgcttggagaactacaagtgaagaaaagaaagcattagatcaggcaagtgaagagatttggaatgattttcgagaagctgcagaagcacatcgacaagttagaaaatacgtaatgagctggatcaagcctgggatgacaatgatagaaatctgtgaaaagttggaagactgttcacgcaagttaataaaagagaatggattaaatgcaggcctggcatttcctactggatgttctctcaataattgtgctgcccattatactcccaatgccggtgacacaacagtattacagtatgatgacatctgtaaaatagactttggaacacatataagtggtaggattattgactgtgcttttactgtcacttttaatcccaaatatgatacgttattaaaagctgtaaaagatgctactaacactggaataaagtgtgctggaattgatgttcgtctgtgtgatgttggtgaggccatccaagaagttatggagtcctatgaagttgaaatagatgggaagacatatcaagtgaaaccaatccgtaatctaaatggacattcaattgggcaatatagaatacatgctggaaaaacagtgccgattgtgaaaggaggggaggcaacaagaatggaggaaggagaagtatatgcaattgaaacctttggtagtacaggaaaaggtgttgttcatgatgatatggaatgttcacattacatgaaaaattttgatgttggacatgtgccaataaggcttccaagaacaaaacacttgttaaatgtcatcaatgaaaactttggaacccttgccttctgccgcagatggctggatcgcttgggagaaagtaaatacttgatggctctgaagaatctgtgtgacttgggcattgtagatccatatccaccattatgtgacattaaaggatcatatacagcgcaatttgaacataccatcctgttgcgtccaacatgtaaagaagttgtcagcagaggagatgactattaaacttagtccaaagccacctcaacacctttattttctgagctttgttggaaaacatgataccagaattaatttgccacatgttgtctgttttaacagtggacccatgtaatacttttatccatgtttaaaaaagaaggaatttggacaaaggcaaaccgtctaatgtaattaaccaacgaaaaagctttccggacttttaaatgctaactgtttttccccttcctgtctaggaaaatgctataaagctcaaattagttaggaatgacttatacgttttgttttgaatacctaagagatactttttggatatttatattgccatattcttacttgaatgctttgaatgactacatccagttctgcacctataccctctggtgttgctttttaaccttcctggaatccattttctaaaaaataaagacacattcttctcagcaccacacaacacctattccaaaatcgaccacatatttggaagtaaagctctcctcagcaaatgtaaaagaacagaaattataacaaactgtctctcagaccacagtataaccaaactagaactcaggattaagaaactcactcaaaaccacacaactacatggaaactgaacaacctgctcctgaatgactactggatacataacaaaatgaaggcagaaataaagatgttctttaaaaccaatgagaacaaagacacaacataccagaatctctgggacacattcaaagcagtgtgtagagggaaatttatagcactaaatgcccacaagagaaagcaggaaatatctaaaattgacaccctaacatcacaattaaaagaactagagaagcaagagcaaacacattgaaaagctaagagaaggcaagaaataactaagatcagagcagaactgaaggaaatagagacacaaaaaactcttcaaaaaatcaatgaatccaggagctggttttttgaaacgatcaacaaaattgatagacactagcaagactaataaagaagaaaggagagaagaatcaaatagaagcaataaaaaatgataaaggggatatcaccaccaatcccacagaaataaaccaccatcagagaatactacaaacacctctacgcaa

SEQ ID NO: 237 - DNA, 724 bp, HUMAN
gagcatacaccgagagagtgaggagccagacgacaagcacacactatggcgctgaaacggattaataaggaacttagtgatttggcccgtgaccctccagcacaatgttctgcaggtccagttggggatgatatgtttcattggcaagccacaattatgggacctaatgacagcccatatcaaggcggtgtattctttttgacaattcattttcctacagactaccccttcaaaccacctaaggttgcatttacaacaagaatttatcatccaaatattaacagtaatggcagcatttgtctcgatattctaagatcacagtggtcgcctgctttaacaatttctaaagttcttttatccatttgttcactgctatgtgatccaaacccagatgaccccctagtgccagagattgcacggatctataaaacagacagagataagtacaacagaatatctcgggaatggactcagaagtatgccatgtgatgctaccttaaagtcagaataacctgcattatagctggaataaactttaaattactgttccttttttgattttcttatccggctgctcccctgatcagacctcatcttttttaattttattttttgtttacctccctccattcattcacatgctcatctgagaagacttaagttcttccagctttgacaataactgcttttagaaactgtaaagtagttacaagagaacagttgg

SEQ ID NO: 238 - DNA, 3755 bp, HUMAN
ggcggctgcggcacgggaaaggctcagtgactgaagctccaaaggccagcaggctggtggggacgtgaccgaagcgaggctctggttccctttcggtgggcgccatttgagcctcatctctggcttccccaggatgcgccggcagccggggagcggctccgggcgcgaggtctgaggatgatctttcctgtcgcccgctacgcgctccggtggctgcgacggcccgaagaccgtgccttttcccgcgccgccatggagatggccctccgaggcgtgcggaaagtcctctgtgtggccgaaaaaaacgacgcggccaaggggatcgccgacctgctgtcaaacggtcgcatgaggcggagagaaggactttcaaaattcaacaagatctatgaatttgattatcatctgtatggccagaatgttaccatggtaatgacttcagtttctggacatttactggctcatgatttccagatgcagtttcgaaaatggcagagctgcaaccctcttgtcctctttgaagcagaaattgaaaagtactgcccagagaattttgtagacatcaagaaaactttggaacgagagactcgccagtgccaggctctggtgatctggactgactgtgatagagaaggcgaaaacatcgggtttgagattatccacgtgtgtaaggctgtaaagcccaatctgcaggtgttgcgagcccgattctctgagatcacaccccatgccgtcaggacagcttgtgaaaacctgaccgagcctgatcagagggtgagcgatgctgtggatgtgaggcaggagctggacctgaggattggagctgcctttactaggttccagaccctgcggcttcagaggatttttcctgaggtgctggcagagcagctcatcagttacggcagctgccagttccccacactgggctttgtggtggagcggttcaaagccattcaggcttttgtaccagaaatcttccacagaattaaagtaactcatgaccacaaagatggtatcgtagaattcaactggaaaaggcatcgactctttaaccacacggcttgcctagttctctatcagttgtgtgtggaggatcccatggcaactgtggtagaggtcagatctaagcccaagagcaagtggcggcctcaagccttggacactgtggagcttgagaagctggcttctcgaaagttgagaataaatgctaaagaaaccatgaggattgctgagaagctctacactcaagggtacatcagctatccccgaacagaaacaaacatttttcccagagacttaaacctgacggtgttggtggaacagcagacccccgatccacgctggggggcctttgcccagagcattctagagcggggtggtcccaccccacgcaatgggaacaagtctgaccaagctcaccctcccattcaccccaccaaatacaccaacaacttacagggagatgaacagcgactgtacgagtttattgttcgccatttcctggcttgctgctcccaggatgctcaggggcaggagaccacagtggagatcgacatcgctcaggaacgctttgtggcccatggcctcatgattctggcccgaaactatctggatgtgtatccatatgatcactggagtgacaagatcctccctgtctatgagcaaggatcccactttcagcccagcaccgtggagatggtggacggggagaccagcccacccaagctgctcaccgaggccgacctcattgccctcatggagaagcatggcattggtacggatgccactcatgcggagcacatcgagaccatcaaagcccggatgtacgtgggcctcaccccagacaagcggttcctccctgggcacctgggcatgggacttgtggaaggttatgattccatgggctatgaaatgtctaagcctgacctccgggctgaactggaagctgatctgaagctgatctgtgatggcaaaaaggacaaatttgtggttctaaggcagcaagtgcagaaatacaagcaggttttcattgaagcggtggctaaagcaaagaaattggacgaggccttggcccagtactttgggaatgggacagagttggcccagcaagaagatatctacccagccatgccagagcccatcaggaagtgcccacagtgcaacaaggacatggtccttaagaccaagaagaatggcgggttctacctcagctgcatgggtttcccagagtgtcgctcagctgtgtggcttcctgactcggtgctggaggccagcagggacagcagtgtgtgtccagtttgtcagccacaccctgtgtacaggttaaagttaaagtttaagcgcggtagccttcccccgaccatgcctctggagtttgtttgctgcatcggcggatgcgacgacaccctgagggagatcctggacctgagattttcagggggcccccccagggctagccagccctctggccgcctgcaggctaaccagtccctgaacaggatggacaacagccagcacccccagcctgctgacagcagacagactgggtcctcaaaggctctggcccagaccctcccaccacccacggctgctggtgaaagcaattctgtgacctgcaactgtggccaggaggctgtgctgctcactgtccgtaaggagggccccaaccggggccggcagttctttaagtgcaacggaggtagctgcaacttcttcctgtgggcagacagccccaatccgggagcaggagggcctcctgccttggcatatagacccctgggcgcctccctgggatgcccaccaggcccagggatccacctaggtgggtttggcaaccctggtgatggcagtggtagtggcacatcctgcctttgcagccagccctccgtcacacggactgtgcagaaggatggacccaacaaggggcgccagttccacacatgtgccaagccgagagagcagcagtgtggctttttccagtgggtcgatgagaacaccgctccagggacttctggagccccgtcctggacaggagacagaggaagaaccctggagtcggaagccagaagcaaaaggccccgggccagttcctcagacatggggtccacagcaaagaaaccccggaaatgcagcctttgccaccagcctggacacacccgtcccttttgtcctcagaacagatgagctcagggtagggtagagaacgccactttctcagacctgtcccctttgtgtttagaaatgagttaaccaggaccaagtggccatttagtgtcctggaaacttagaggacagtgttggcctttggagtcgggccttcttgtgttaaggggcacaaggtccagatcactctggagcaggccagctctgctggacagtgaccctcttcccaggcctcaggagtgaccatagccactgctgaaaagtcacgcagctgctccctcggaccccccaaggatggttgctgttagcagaggattggtgcagtcccagctgaagcccactgtgtgccaaaggaagaagctcccagggctgcttccttcacctgcagaaagccccaagtgagccaccagcactcatggggcagtccctgtccaggctgcccagggcttctcatagacgtcctgagaaggacggtgtaatgcaaggaaatggctgtggtaacactgatccttcagaagaagcttcattccctcttaatctagttaagccaggacatccagaattcattgctttaataaagaacccaggccggg

SEQ ID NO: 239 - DNA, 1986 bp, HUMAN
catgattcccaagcttggcacgagggtccgcaagcccggctgagagcgcgccatggggcaggcgggctgcaaggggctctgcctgtcgctgttcgactacaagaccgagaagtatgtcatcgccaagaacaagaaggtgggcctgctgtaccggctgctgcaggcctccatcctggcgtacctggtcgtatgggtgttcctgataaagaagggttaccaagacgtcgacacctccctgcagagtgctgtcatcaccaaagtcaagggcgtggccttcaccaacacctcggatcttgggcagcggatctgggatgtcgccgactacgtcattccagcccaggaaaagaacgtcttttttgtggtcaccaacctgattgtgacccccaaccagcggcagaacgtctgtgctgagaatgaaggcattcctgatggcgcgtgctccaaggacagcgactgccacgctggggaagcggttacagctggaaacggagtgaagaccggccgctgcctgcggagagagaacttggccaggggcacctgtgagatctttgcctggtgcccgttggagacaagctccaggccggaggagccattcctgaaggaggccgaagacttcaccattttcataaagaaccacatccgtttccccaaattcaacttctccaacaatgtgatggacgtcaaggacagatctttcctgaaatcatgccactttggccccaagaaccactactgccccatcttccgactgggctccgtgatccgctgggccgggagcgacttccaggatatagccctggagggtggcgtgataggaattaatattgaatggaactgtgatcttgataaagctgcctctgagtgccaccctcactattcttttagccgtctggacaataaactttcaaagtctgtctcctccgggtacaacttcagatttgccagatattaccgagacgcagccggggtggagttccgcaccctgatgaaagcctacgggatccgctttgacgtgatggtgaacggcaagggtgcctccttctgcgacctggtactcatctacctcatcaaaaagagagagttttaccgtgacaagaagtaccaggaagtgaggggcctagaagacagttcccaggaggccgaggacgaggcatcggggctggggctatctgagcagctcacatctgggccagggctgctggggatgccggagcagcaggagctgcaggagccacccgaggcgaacgttggaagcagcagtcagaaggggaacggatctgtgtgcccacagctcctggagccccacaggagcacgtgaattgcctctgcttacgttcaggccctgtcctaaacccagccgtctagcacccagtgatcccatgcctttgggaatcccaggatgctgcccaacgggaaatttgtacattgggtgctatgaatgccacatcacagggaccagccatcacagagcaaagtgacctccacgtctgatgctggggtcatcaggacggacccatcatggctatctttttgccccaccccctgccgtcagttcttcctttctccgtggctggcttcccgcactagggaacgggttgtaaatggggaacatgacttccttccggagtccttgagcacctcagctaaggaccgcagtgccctgtagagttcctagattacctcactgggaatagcattgtgcgtgtccggaaaagggctccatttggttccagcccactcccctctgcaagtgccgcagcttccctcaggcatactctccagtggatccaagtactctctctcctaaagacaccaccttcctgccagctgtttgcccttaggccagtacacagaattgaaagtgggggaggtggcagacgctttctgggacctgcccaagatatgtattctctgacactcttatttggtcataaaacaataaatggtgtcaatttcaaaaaaaaaaaaaaaaaaaaaaaaaaaaaa

SEQ ID NO: 240 - DNA, 1791 bp, HUMAN
gcacgagcgaccatagctctccaggtcaatggccagcaaggaggggggtccgagccggcggcggcggcggcagtggtggcagcgggagacaaatggaaacctccacagggcacagactccatcaagatggagaacgggcagagcacagccgccaagctggggctgcctcccctgacgcccgagcagcaggaggcccttcagaaggccaagaagtacgccatggagcagagcatcaagagtgtgctggtgaagcagaccatcgcgcaccagcagcagcagctcaccaacctgcagatggcggctcagcggcagggggcgctggccatcatgtgccgcgtctacgtgggctctatctactatgagctgggggaggacaccatccgccaggcctttgccccctttggccccatcaagagcatcgacatgtcctgggactccgtcaccatgaagcacaagggctttgccttcgtggagtatgaggtccccgaagctgcacagctggccttggagcagatgaactcggtgatgctggggggcaggaacatcaaggtgggcagacccagcaacatagggcaggcccagcccatcatagaccagttggctgaggaggcacgggccttcaaccgcatctacgtggcctctgtgcaccaggacctctcagacgatgacatcaagagcgtgtttgaggcctttggcaagatcaagtcctgcacactggcccgggaccccacaactggcaagcacaagggctacggcttcattgagtacgagaaggcccagtcgtcccaagatgctgtgtcttccatgaacctctttgacctgggtggccagtacttgcgggtgggcaaggctgtcacaccgcccatgcccctactcacaccagccacgcctggaggcctcccacctgccgctgctgtggcagctgctgcagccactgccaagatcacagctcaggaagcagtggccggagcagcggtgctgggtaccctgggcacacctggactggtgtccccagcactgaccctggcccagcccctgggcactttgccccaggctgtcatggctgcccaggcacctggagtcatcacaggtgtgaccccagcccgtcctcctatcccggtcaccatcccctcggtgggagtggtgaaccccatcctggccagccctccaacgctgggtctcctggagcccaagaaggagaaggaagaagaggagctgtttcccgagtcagagcggccagagatgctgagcgagcaggagcacatgagcatctcgggcagtagcgcccgacacatggtgatgcagaagctgctccgcaagcaggagtctacagtgatggttctgcgcaacatggtggaccccaaggacatcgatgatgacctggaaggggaggtgacagaggagtgtggcaagttcggggccgtgaaccgcgtcatcatctaccaagagaaacaaggcgaggaggaggatgcagaaatcattgtcaagatctttgtggagttttccatagcctctgagactcataaggccatccaggccctcaatggccgctggtttgctggccgcaaggtggtggctgaagtgtacgaccaggagcgttttgataacagtgacctctctgcgtgacagtggtccctctccccggacttgcacttgttccttgtttcctctgggttttatagtgatacagtggtgtccccggggccaggcgcgctctgcccagcccagcctacagtgcggataaaggtgcggatgctgctggccctgaaaaaaaaaaaaaaaaaactcgag

SEQ ID NO: 241 - DNA, 2613 bp, HUMAN
tcttggtctcggctcctggcccagtgctctttcccatgtgtctgaatctgcatcttgggcaggggtccctgggccccactcctggacccccggactgacccccaccccatcttgtgcttagcagattcttcccctggtggccatgggacccaggtcaatgtcacctgcatcgtgaacgtctgtagcagctctgaccacagctcacagtgctcctcccaagccagctccacaatgggagacacagattccagcccctcggagtccccgaaggacgagcaggtccccttctccaaggaggaatgtgcctttcggtcacagctggagacgccagagaccctgctggggagcaccgaagagaagcccctgccccttggagtgcctgatgctgggatgaagcccagttaaccaggccggtgtgggctgtgtcgtagccaaggtgggctgagccctggcaggatgaccctgcgaaggggccctggtccttccaggcccccaccactaggactctgaggctctttctgggccaagttcctctagtgccctccacagccgcagcctccctctgacctgcaggccaagagcagaggcagcgagttggggaaagcctctgctgccatggtgtgtccctctcggaaggctggctgggcatggacgttcggggcatgctggggcaagtccctgactctctgtgacctgccccgcccagctgcacctgccagcctggcttctggagcccttgggttttttgtttgtttgtttgtttgtttgtttgtttctccccctgggctctgcccagctctggcttccagaaaaccccagcatccttttctgcagaggggctttctggagaggagggatgctgcctgagtcacccatgaagacaggacagtgcttcagcctgaggctgagactgcgggatggtcctggggctctgtgtagggaggaggtggcagccctgtagggaacggggtccttcaagttagctcaggaggcttggaaagcatcacctcaggccaggtgcagtggctcacgcctatgatcccagcactttgggaggctgaggcgggtggatcacctgaggttaggagttcgagaccagcctggccaacatggtaaaaccccatctctactaaaaatacagaaattagccgggcgtggtggcgggcacctatagtcccagctactcagaagcctgaggctgggaaatcgtttgaacccgggaagcggaggttgcagggagccgagatcacgccactgcactccagcctgggcgacagagcgagagtctgtctcaaaagaaaaaaaaaaaagcaccgcctccaaatgctaacttgtccttttgtaccatggtgtgaaagtcagatgcccagagggcccaggcaggccaccatattcagtgctgtggcctgggcaagataacgcacttctaactagaaatctgccaattttttaaaaaagtaagtaccactcaggccaacaagccaacgacaaagccaaactctgccagccacatccaaccccccacctgccatttgcaccctccgccttcactccggtgtgcctgcagccccgcgcctccttccttgctgtcctaggccacaccatctcctttcagggaatttcaggaactagagatgactgagtcctcgtagccatctctctactcctacctcagcctagaccctcctcctcccccagaggggtgggttcctcttccccactccccaccttcaattcctgggccccaaacgggctgccctgccactttggtacatggccagtgtgatcccaagtgccagtcttgtgtctgcgtctgtgttgcgtgtcgtgggtgtgtgtagccaaggtcggtaagttgaatggcctgccttgaagccactgaagctgggattcctccccattagagtcagccttccccctcccagggccagggccctgcagaggggaaaccagtgtagccttgcccggattctgggaggaagcaggttgaggggctcctggaaaggctcagtctcaggagcatggggataaaggagaaggcatgaaattgtctagcagagcaggggcagggtgataaattgttgataaattccactggacttgagcttggcagctgaactattggagggtgggagagcccagccattaccatggagacaagaagggttttccaccctggaatcaagatgtcagactggctggctgcagtgacgtgcacctgtactcaggaggctgaggggaggatcactggagcccaggagtttgaggctgcagcgagctatgatcgcgccactacactccagcctgagcaacagagtgagaccctgtctcttaaagaaaaaaaaagtcagactgctgggactggccaggtttctgcccacattggacccacatgaggacatgatggagcgcacctgccccctggtggacagtcctgggagaacctcaggcttccttggcatcacagggcagagccgggaagcgatgaatttggagactctgtggggccttggttcccttgtgtgtgtgtgttgatcccaagacaatgaaagtttgcactgtatgctggacggcattcctgcttatcaataaacctgtttgttttaaaaaaaa

SEQ ID NO: 242 - DNA, 2149 bp, HUMAN
  misc_feature (1)..(2149): N=any base
gacatggccaacatcgcggtgcagcgaatcaagcgggagttcaaggaggtgctgaagagcgaggagacgagcaaaaatcaaattaaagtagatcttgtagatgagaattttacagaattaagaggagaaatagcaggacctccagacacaccatatgaaggaggaagataccaactagagataaaaataccagaaacatacccatttaatccccctaaggtccggtttatcactaaaatatggcatcctaatattagttccgtcacaggggctatttgtttggatatcctgaaagatcaatgggcagctgcaatgactctccgcacggtattattgtcattgcaagcactattggcagctgcagagccagatgatccacaggatgctgtagtagcaaatcagtacaaacaaaatcccgaaatgttcaaacagacagctcgactttgggcacatgtgtatgctggagcaccagtttctagtccagaatacaccaaaaaaatagaaaacctatgtgctatgggctttgataggaatgcagtaatagtggccttgtcttcaaaatcatgggatgtagagactgcaacagaattgcttctgagtaactgaggcatagagagctgctgatatagtcaagcttgcctcttcttgaggagcaccaacatctgttatttttaggattctgcatagatttcttttaatctggcattctcgcctaatgatgttatctaggcaccattggagactgaaaaaaaaaaatccctgctctgtaaataaagctaattaaacgtctgtgtaaatttaaaaaggggaaatactttaattttttttcttaatagtgtaaaaattccctgagctaagctaaaaccatggaagaaacatgctactttagtgtttagcagtgtaccaagactagcaagagtttgcttcaggatttggttgaataattaagataatatttggagtgtgtcagggccattcaaattgttggtgttgcatcacagctaccttaactgtttttaacatggatcctctgtgcctgtgaatttacttgcatgcttgtacttgacttcttaggatgggtagctgaaaagaccaccattttaagcatttgagaattcttaaatatgaaatttattcagaattgaagatggtgacctattcagagcctttttgtccttgtcaacagactgggacagtgtctgattcccccttcacccccccccacccccgccttggcacacacagctaatattctaatggtaaatttctctgtatcaggtggggaaatgtgctgaaggacagtatgtatcccttgcttcatttttaggtcgtaggtttggaatgtcttgtcccagttcttcaaacactcttaaatttttcttaagtaatgtaaaaatggaactgccaattttatttctcttgcaaaaatagtaaatacttgatgttacattattcccaggtttaatgaaagaacccaacttagtttttcagtgaatttgacacctattttttagtgatgaaatttttctttgagaactggcaaggatgcagtcagctgtttgcagtttttagcctgattttggggtctatagagattgctttattggatacttcaagtcattcttgcttgcacttcccctattgacacatgaaagctgtgttggtgttttattgtacatacttcagatgcacataggaatagaagtgtgttataaatctagctttctttatgatgtttctgataatacgagaattgaaaactttaccttctcttgtacatagtcagactatttgtattaaatttacatttcattctaagttccaaaagtttgaaaattattagttttgcaagatcacacactaatgtaaccattttatgaaggttgaagtggatttatgcaggcagttctatatatagaaatncaattctttttaaatttttaggaccaatacaaaataacacaaatgtaatggaatcagactgaattaaagtaaggctgtatattgaaagtcatattataaaaggtttgctttctttaagtgttatttatcttaaattataatcgttaaatgtttggaagataatttttgaatcataacgtcagcataacttcatttgacttctcaataatcttgtcgacgcggccgc

SEQ ID NO: 243 - DNA, 3343 bp, HUMAN
tcccagccggctgaggcgggcagggccgggcggggccgcgccacggagtccacagcccggcgctccctgccgcgccgccgccgcaccgcgccccacaggagaagacgaaccgggcccggcggccgaagcggcccgcgaggcgcgggaggcatgaagttgggcgcgcacgggcctcgaagcggcggggagccgggagccgcccgcatctagagcccgcgaggtgcgtgcgccatggagctagggggccccggagcgccgcggctgctgccgccgctgctgctgcttctggggaccggcctcctgcgcgccagcagccatgtggagacccgggcccacgccgaggagcggctcctgaagaaactcttctccggttacaacaagtggtcccgacccgtggccaacatctcggacgtggtcctcgtccgcttcggcctgtccatcgctcagctcattgacgtggatgagaagaaccagatgatgaccacgaacgtatgggtgaagcaggagtggcacgactacaagctgcgctgggacccagctgactatgagaatgtcacctccatccgcatcccctccgagctcatctggcggccggacatcgtcctctacaacaatgctgacggggacttcgcggtcacccacctgaccaaggcccacctgttccatgacgggcgggtgcagtggactcccccggccatttacaagagctcctgcagcatcgacgtcaccttcttccccttcgaccagcagaactgcaccatgaaattcggctcctggacctacgacaaggccaagatcgacctggtgaacatgcacagccgcgtggaccagctggacttctgggagagtggcgagtgggtcatcgtggacgccgtgggcacctacaacaccaggaagtacgagtgctgcgccgagatctacccggacatcacctatgccttcgtcatccggcggctgccgctcttctacaccatcaacctcatcatcccctgcctgctcatctcctgcctcaccgtgctggtcttctacctgccctccgagtgtggcgagaagatcacgctgtgcatctccgtgctgctgtcgctcaccgtcttcctgctgctcatcaccgagatcatcccgtccacctcactggtcatcccactcatcggcgagtacctgctgttcaccatgatcttcgtcaccctgtccatcgtcatcacggtcttcgtgctcaacgtgcaccaccgctcgccacgcacgcacaccatgcccacctgggtacgcagggtcttcctggacatcgtgccacgcctgctcctcatgaagcggccgtccgtggtcaaggacaattgccggcggctcatcgagtccatgcataagatggccagtgccccgcgcttctggcccgagccagaaggggagccccctgccacgagcggcacccagagcctgcaccctccctcaccgtccttctgcgtccccctggatgtgccggctgagcctgggccttcctgcaagtcaccctccgaccagctccctcctcagcagcccctggaagctgagaaagccagcccccacccctcgcctggaccctgccgcccgccccacggcacccaggcaccagggctggccaaagccaggtccctcagcgtccagcacatgtccagccctggcgaagcggtggaaggcggcgtccggtgccggtctcggagcatccagtactgtgttccccgagacgatgccgcccccgaggcagatggccaggctgccggcgccctggcctctcgcaacacccactcggctgagctcccacccccagaccagccctctccgtgcaaatgcacatgcaagaaggagccctcttcggtgtccccgagcgccacggtcaagacccgcagcaccaaagcgccgcccccgcacctgcccctgtcgccggccctgacccgggcggtggagggcgtccagtacattgcagaccacctgaaggccgaagacacagacttctcggtgaaggaggactggaagtacgtggccatggtcatcgaccgcatcttcctctggatgttcatcatcgtctgcctgctggggacggtgggcctcttcctgccgccctggctggctggcatgatctaggaagggaccgggagcctgcgtggcctggggctgccgtgcacggggccagcatccatgcggccggcctggggccgggctggcttctccctggactctgtggggccacacgtttgccaaattttccttcctgttctgtgtctgctgtaagacggccttggacggggacacggcctctggggagaccgagtgtggagctgcttccagttggactgtggcctcaggaggcagtggcttggagcagaggtgggggtcgccgccttctacctgcaggactcgggctaagtccagctctccccctgcgcagccctccgcggcggacaggaacaccagccccagcgagtctggagaccaggactctgccttccaggcgtagggccagggctctggcaggtggccagggctccacggggggctagtggcttcagcccctggggtacttctgtgttgtgattccccggagctgggaaggtcccgaatggagtccagacctgggccctggttcccccaggaccctgagggtttccaccttggcgcgcagcccgggagatccgccctgggctctgggttcgggaagaaggacttcctgctacagtagctgtggggagctggtgggggcatccttgaggacctccacctgggagatgctgggaccctcggggcaggaagtccctgagaagcctcatgggagtcagggagccctggggtttccacacaggcccatgccctccgtcctggcagggcaggcagagctcagcacagcctcacccctgcaggcggtatccagaggtgagggaggcctgaaatgtttccaggcatgaccctggagcccggcagtgcaccccctaaagatggcgcacccggcagccccccattgtccccaggggcacacttcccccttgggatgggcacagcctgccccacccctccatgattccaagggccaagaggggcggggccaggatggcttttcccctgcctgtgagtgacatcggttcaggaggagacagtcaggaagcctcctgctgagtggtccacattctgctgcccccagaccccatccagccaggggtggggatggggttgggctctgcgtcccactgagtctcattcctctgtccccgagccgagctctcctgggccagggtctcgtcaggaggtgcctgagagcagaatgaataattgaggttaggaacccggcatgccgagtgccccagaaatgccgctgtgt

SEQ ID NO: 244 - DNA, 2535 bp, HUMAN
gaattccggggtggtctgagctggagccacgctttctgttggagggggcagctgaaggagaacagcaagacatatccggcggccctacggactcggagagctggagggaccccggagatctcaaagggacaggaaaggcagcagcagccaccctctctcccagtcaagtggtcaccagcaggactgaaggggacagcccctttgcagtggctcggcgaggagacccctgcaccctagggtcagtgcaggagcccagccgctgagccatgccgggtccccgggcggcctgcagcgagcccaacccctgcacccaggtagtcatgaacagccacagctacaatggcagcgtggggcggccgctgggcagcgggccgggcgccctgggacgagaccctccggaccctgaggccggccaccccccacaacccccgcacagcccgggcctccaggtggtagtggccaagagtgagccagcccggccctcacccggcagcccccgggggcagccccaggaccaggacgatgacgaggatgatgaggaagatgaggccggcaggcagagagcctcggggaaaccctcaaatgtgggccaccgcctgggccaccggcgggcgctcttcgagaagcggaagcgcctcagcgactatgccctcattttcggcatgtttggcatcgtcgtcatggtgacggagaccgagctgtcctggggggtgtacaccaaggagtctctgtactcattcgcactcaaatgcctcatcagcctctccacggccatcctgctgggtctcgttgtcctctaccatgcccgggagatccagctgttcatggtggacaacggggctgatgactggcgcatcgccatgacctgcgagcgcgtgttcctcatctcgctagagctggcagtgtgcgccattcacccggtgcccggccactaccgcttcacgtggacggcgcggctggccttcacgtacgcgccctcggtggccgaggccgacgtggacgtgctgctgtccatccccatgttcctgcgcctctacctgctgggccgggtgatgctactgcacagcaaaatcttcacggacgcctcgagccgcagcatcggggccctcaacaagatcaccttcaacacgcgcttcgtcatgaagacactcatgaccatctgccccggcaccgtgctgctggtcttcagcatctcctcctggatcatcgcagcctggaccgtgcgcgtctgcgagaggtaccacgacaagcaggaagtgaccagcaacttcctgggggccatgtggctgatttccatcaccttcctctccattggctacggcgacatggtgccccacacctactgcgggaagggtgtgtgcctgctcactggcatcatgggagctggctgtaccgcgctcgtggtggctgtggtggctcggaagctggagctcaccaaggctgagaagcacgtgcacaacttcatgatggacactcagctcaccaagcgggtaaaaaacgccgctgctaacgttctcagggagacgtggctcatctacaaacataccaggctggtgaagaagccagaccaagcccgggttcggaaacaccagcgtaagttcctccaagccatccatcaggctcagaagctccggagtgtgaagatcgagcaagggaagctgaacgaccaggctaacacgcttaccgacctagccaagacccagaccgtcatgtacgaccttgtatcggagctgcacgctcagcacgaggagctggaggcccgcctggccaccctggaaagccgcttggatgcgctgggtgcctctctacaggccctgcctggcctcatcgcccaagccatacgcccacccccgcctcccctgcctcccaggcccggccccggcccccaagaccaggcagcccggagctccccctgccggtggacgcccgtggccccctcggactgcgggtgacggccctgcccgccaccagacccctaaatcttggccatcgtgtggccgccacctccgggaagccttgtacagtggcgcctcttggagttcaagaagccgacgctgagtcaggctgagtggactgaggcctgccccgcccagactgcccaggcagagggcagggctggaccatgggtgagggcaggggagcccggagcttcctctggtcacctggtcccccgactctccccaggcccccggtgggcatggagcagcccggggaggggtccgtgctggttctgaataaagcaggacccgcctagtggctgcctgtgtgcatggctggaaggcactggtgatgtcccaggaggtagacctccagccctgggtaccaagatgaatgtgggaatcagaaaaacctgttcccatcaccggcctagcctagaatcctagcctagaagccctctctccctctggctggagctcagtagggacaactctctagggacacctgtaccagccccacctggcgctgagatccctcagacagcatggcccagccctggccagaagcatcgctccccttcaaccaaccgcgttgatg

SEQ ID NO: 245 - DNA, 1537 bp, HUMAN
cactcctgcctccaccatgtccatcagggtgacccagaagtcctacaaggtgtccacctctggcccccgggccttcagcagccgctcctacacgagtgggcccggttcccgcatcagctcctcgagcttctcccgagtgggcagcagcaactttcgcggtggcctgggcggcggctatggtggggccagcggcatgggaggcatcaccgcagttacggtcaaccagagcctgctgagcccccttgtcctggaggtggaccccaacatccaggccgtgcgcacccaggagaaggagcagatcaagaccctcaacaacaagtttgcctccttcatagacaaggtacggttcctggagcagcagaacaagatgctggagaccaagtggagcctcctgcagcagcagaagacggctcgaagcaacatggacaacatgttcgagagctacatcaacaaccttaggcggcagctggagactctgggccaggagaagctgaagctggaggcggagcttggcaacatgcaggggctggtggaggacttcaagaacaagtatgaggatgagatcaataagcgtacagagatggagaacgaatttgtcctcatcaagaaggatgtggatgaagcttacatgaacaaggtagagctggagtctcgcctggaagggctgaccgacgagatcaacttcctcaggcagctgtatgaagaggagatccgggagctgcagtcccagatctcggacacatctgtggtgctgtccatggacaacagccgctccctggacatggacagcatcattgctgaggtcaaggcacagtacgaggatattgccaaccgcagccgggctgaggctgagagcatgtaccagatcaagtatgaggagctgcagagcctggctgggaagcacggggatgacctgcggcgcacaaagactgagatctctgagatgaaccggaacatcagccggctccaggctgagattgagggcctcaaaggccagagggcttccctggaggccgccattgcagatgccgagcagcgtggagagctggccattaaggatgccaacgccaagttgtccgagctggaggccgccctgcagcgggccaagcaggacatggcgcggcagctgcgtgagtaccaggagctgatgaacgtcaagctggccctggacatcgagatcgccacctacaggaagctgctggagggcgaggagagccggctggagtctgggatgcagaacatgagtattcatacgaagaccaccagcggctatgcaggtggtctgagctcggcctatgggggcctcacaagccccggcctcagctacagcctgggctccagctttggctctggcgcgggctccagctccttcagccgcaccagctcctccagggccgtggttgtgaagaagatcgagacacgtgatgggaagctggtgtctgagtcctctgacgtcctgcccaagtgaacagctgcggcagcccctcccagcctacccctcctgcgctgccccagagcctgggaaggaggccgctat

SEQ ID NO: 246 - DNA, 545 bp, HUMAN
atggccctgctactggccctcagcctgctggttctctggacttccccagccccaactctgagtggcaccaatgatgctgaagactgctgcctgtctgtgacccagaaacccatccctgggtacatcgtgaggaacttccactaccttctcatcaaggatggctgcagggtgcctgctgtagtgttcaccacactgaggggccgccagctctgtgcacccccagaccagccctgggtagaacgcatcatccagagactgcagaggacctcagccaagatgaagcgccgcagcagttaacctatgaccgtgcagagggagcccggagtccgagtcaagcattgtgaattattacctaacctggggaaccgaggaccagaaggaaggaccaggcttccagctcctctgcaccagacctgaccagccaggacagggcctggggtgtgtgtgagtgtgagtgtgagcgagagggtgagtgtggtctagagtaaagctgctccacccccagattgcaatgctaccaataaagccgcctggtgtttacaact

SEQ ID NO: 247 - DNA, 2534 bp, HUMAN
  misc_feature (1)..(2534): N=any base
ggcacgagcttgctcgcggagagaggagctaggagcctcggccaatgggagccggcgttgttggaggccacggcggcgcagccccaaagcgagcgaagctagggtcgccgccactgccgcaggaggcgtgaggggataaaaacattcagatggcagatcacagtttttcagatggggttccttcagattccgtggaagctgctaaaaatgcaagtaacacagaaaagctcacagatcaggtgatgcagaatcctcgagttctggcagctttacaggagcgacttgacaatgtccctcacaccccttccagctacatcgaaactttacctaaagcagtaaaaagaagaattaatgcattgaaacaacttcaggtgagatgtgctcacatagaagccaagttctatgaagaggtacatgacttggaaagaaagtatgcagcgctataccagcctctctttgacaagagaagagaatttatcaccggcgatgttgaaccaacagatgcggaatcggaatggcacagtgaaaatgaagaggaagagaaattggctggagacatgaaaagtaaagtagtcgtcacagaaaaagcagcggcaacggctgaagagccagatcccaaaggaattccagagttctggtttaccatcttcagaaatgtggacatgctgagtgaattagtccaggaatatgatgaaccaatcttgaaacacctgcaggatattaaagtgaaattttctgaccctggacagcctatgtcttttgtgttagagttccactttgaacccaacgactactttaccaactcagtcctgacaaaaacctacaagatgaaatcagaaccagataaggctgatcccttttcctttgaaggtcctgagattgtggactgtgacgggtgtactattgactggaagaaaggaaagaatgttactgtcaaaaccatcaagaaaaagcagaagcataagggtcgaggcactgttagaacaattacgaaacaagtacccaatgagtcctttttcaacttcttcaatccattgaaagcatccggggatggagaatcactggatgaagattctgaattcacattagcctctgattttgaaattggacactttttccgtgagcggatagtcccgcgggctgtgctgtacttcactggggaggccatagaagatgatgacaattttgaagaaggtgaagaaggagaagaggaggaattagaaggtgacgaggagggagaagacgaggatgatgcggaaattaaccccaaggtgtaatttttgtctgttaatcattcatacgtttctagaaggaacccagccagccggcggaatgcaagcagcagtaggaagcggaggcgggtgcctggcagaccggctgtcgggactccaggcctgtgggcggggcctcggtccttgccgcagcacaatcccgtggacagagcttactccatctaactcgttttcaagtgcatgattttcactttcacttttcctttttccttattattttgattaacttgtacagtggcaactgaaatgcatttcagaaataggaggtttcgtccagcaccctctgcagccttggtgcctgtagctctggacttccctgggcctttccctgtgggagggccctgtagacacatcagggtggggtgggggtcacttggcaaaaagggccgaggtctggtgatgtggttcccaggatcttggaacctctcccacccctcctgcagttggactgaattctaccctttcatccgaagaaacccacttgctgtttccagccgctgaatctgctgagtgtgcagcctgcatcacctgctgtatgccgatcatctcagaaagggctgtgtagagtagggccctgttctccttaggatgttgcttcttgatttttttttttttttaggggtgggtcagggttgtgacacaccagcccaggtgagagctgctgcgggtcacctcatatttatttatcccttcttgcctgtgaggactgcggcttttcgctgtggctcgtccttaacgtttctgaaccaccttggtgccctgagcaggaagatgtgccacttcctagcaggcgcaaggcctgtgcggaagaaacgccgctccctgccaccagggctgaagatgcgagcccgtcctcatgacgcaggcgccaccctgctgccggagccgggcttcggcatcttctccactgagggactgggctgggaagtcctgcgtttcagtggagcgtatgagcgtcaagtcctgctttctcagtagccccattgcggggccccaccattcatcctgtctgaaggtcctgggtttggtgtgaccgcttggcggctggtgggtggggttttcaagtgggtgacggcgctctccggcaaccggggatggccgtgtccgcactgaccaggcctgtggagagtgctcggcctaaccttagaacacaattgtaactgaaaacagtgttttcaatttgtacagaatagttagaatattctaataaagtggtgaaacattgaaaaaaaaanaaaaaaa

SEQ ID NO: 248 - DNA, 417 bp, HUMAN
  misc_feature (1)..(417): N=any base
aattacattgatttattagaagcatttgtagtccttcatggtttcagaaaatcaattgttcagacctttttgaacatatctgattgtgatattcatactgtgtaactctgaatttaaatcaagttcagtggaaattaagatatgatcgtattattttttagtgtatgtttcgtatctgaatttttgatgcagttaaaaaagccttaagaaaacgacaaaaaagctagagtgcagacaacctaaaatctctattttaaaacatcattttcctgaggccatgcagactcatatctaagtttttttcatttaaatagacttaattctaacaaatacttactttcataatggnaaaactttttaaaggtgggacagacatactagttacgaaatggaagttttcaatccacaggattccag

SEQ ID NO: 249 - DNA, 489 bp, HUMAN
  misc_feature (1)..(489): N=any base
ttttttttttttatatttatatttatatttatatatatgtatatatatatatatgtnatgtacaaaagactttgagatatcaggcaccattaaaccacatttccccccttataaatgcaactgttcaagtacactgggaacagttttaaggtacacctgcagtacantaggagaagcatgagtggataatctaaacacaggatcataacagtgatacgctgcaacacctctgtgaattccattanccaagttctgtcattaaaacatnggaaaactactggctcctcaaaataaaaggttttaggnaaccaaaaatcccctaagtagtgaactgttttccaagcagagctccctaatggttttcaatttcctgggcctacaaccaaanggggaccccagttggaagctgccgtttgggaaacgtgggccaggcatcagatcancaacacgggggggaatccngagaggggcncattnttgaagaaggng

SEQ ID NO: 250 - DNA, 429 bp, HUMAN
  misc_feature (1)..(429): N=any base
gacgtgacccagggcagactggtagcaaagcccccacgcccagccaggagcaccgccgaggactccagcacaccgagggacatgctgggcctgcgcccccactgctcgccctggtgggnntgctctccctcgggtgcgtcctctctcaggagtgcacgaagttcaaggtcagcagctgccgggaatgcatcgagtcggggcccggctgcacctggtncagaagctgggagcggctttgggtcctccagcccacgccaccgcggcgaagcaagtccccggagangaagccgggtggctcccgtctgtcctcggactgagcagggtggccaaggcccaggttggaaactaccttggtcaggctgggttttttncctcccctttctggaggttttcaagctcctcttgaaataaacaccttttcaagtgaga

SEQ ID NO: 251 - DNA, 1761 bp, HUMAN
ttgccgatccgccgcccgtccacacccgccgccagctcaccatggatgatgatatcgccgcgctcgtcgtcgacaacggctccggcatgtgcaaggccggcttcgcgggcgacgatgccccccgggccgtcttcccctccatcgtggggcgccccaggcaccagggcgtgatggtgggcatgggtcagaaggattcctatgtgggcgacgaggcccagagcaagagaggcatcctcaccctgaagtaccccatcgagcacggcatcgtcaccaactgggacgacatggagaaaatctggcaccacaccttctacaatgagctgcgtgtggctcccgaggagcaccccgtgctgctgaccgaggcccccctgaaccccaaggccaaccgcgagaagatgacccagatcatgtttgagaccttcaacaccccagccatgtacgttgctatccaggctgtgctatccctgtacgcctctggccgtaccactggcatcgtgatggactccggtgacggggtcacccacactgtgcccatctacgaggggtatgccctcccccatgccatcctgcgtctggacctggctggccgggacctgactgactacctcatgaagatcctcaccgagcgcggctacagcttcaccaccacggccgagcgggaaatcgtgcgtgacattaaggagaagctgtgctacgtcgccctggacttcgagcaagagatggccacggctgcttccagctcctccctggagaagagctacgagctgcctgacggccaggtcatcaccattggcaatgagcggttccgctgccctgaggcactcttccagccttccttcctgggcatggagtcctgtggcatccacgaaactaccttcaactccatcatgaagtgtgacgtggacatccgcaaagacctgtacgccaacacagtgctgtctggcggcaccaccatgtaccctggcattgccgacaggatgcagaaggagatcactgccctggcacccagcacaatgaagatcaagatcattgctcctcctgagcgcaagtactccgtgtggatcggcggctccatcctggcctcgctgtccaccttccagcagatgtggatcagcaagcaggagtatgacgagtccggcccctccatcgtccaccgcaaatgcttctaggcggactatgacttagttgcgttacaccctttcttgacaaaacctaacttgcgcagaaaacaagatgagattggcatggctttatttgttttttttgttttgttttggttttttttttttttttggcttgactcaggatttaaaaactggaacggtgaaggtgacagcagtcggttggagcgagcatcccccaaagttcacaatgtggccgaggactttgattgcacattgttgtttttttaatagtcattccaaatatgagatgcattgttacaggaagtcccttgccatcctaaaagccaccccacttctctctaaggagaatggcccagtcctctcccaagtccacacaggggaggtgatagcattgctttcgtgtaaattatgtaatgcaaaatttttttaatcttcgccttaatacttttttattttgttttattttgaatgatgagccttcgtgcccccccttccccctttttgtcccccaacttgagatgtatgaaggcttttggtctccctgggagtgggtggaggcagccagggcttacctgtacactgacttgagaccagttgaataaaagtgcacacctta

SEQ ID NO: 252 - DNA, 2300 bp, HUMAN
tatattccgggggtctgcgcggccgaggacccctgggtgcgctgctctcagctgccgggtccgactcgcctcactcagctcccctcctgcctcctgaagggcagcttcgccgacgcttggcgggaaaaagaagggaggggagggatcctgagtcgcagtataaaagaagcttttcgggcgtttttttctgactcgctgtagtaattccagcgagagacagagggagtgagcggacggttggaagagccgtgtgtgcagagccgcgctccggggcgacctaagaaggcagctctggagtgagaggggctttgcctccgagcctgccgcccactctccccaaccctgcgactgacccaacatcagcggccgcaaccctcgccgccgctgggaaactttgcccattgcagcgggcagacacttctcactggaacttacaatctgcgagccaggacaggactccccaggctccggggagggaatttttgtctatttggggacagtgttctctgcctctgcccgcgatcagctctcctgaaaagagctcctcgagctgtttgaaggctggatttcctttgggcgttggaaaccccgcagacagccacgacgatgcccctcaacgtgaacttcaccaacaggaactatgacctcgactacgactccgtacagccctatttcatctgcgacgaggaagagaatttctatcaccagcaacagcagagcgagctgcagccgcccgcgcccagtgaggatatctggaagaaattcgagctgcttcccaccccgcccctgtccccgagccgccgctccgggctctgctctccatcctatgttgcggtcgctacgtccttctccccaagggaagacgatgacggcggcggtggcaacttctccaccgccgatcagctggagatgatgaccgagttacttggaggagacatggtgaaccagagcttcatctgcgatcctgacgacgagaccttcatcaagaacatcatcatccaggactgtatgtggagcggtttctcagccgctgccaagctggtctcggagaagctggcctcctaccaggctgcgcgcaaagacagcaccagcctgagccccgcccgcgggcacagcgtctgctccacctccagcctgtacctgcaggacctcaccgccgccgcgtccgagtgcattgacccctcagtggtctttccctacccgctcaacgacagcagctcgcccaaatcctgtacctcgtccgattccacggccttctctccttcctcggactcgctgctgtcctccgagtcctccccacgggccagccctgagcccctagtgctgcatgaggagacaccgcccaccaccagcagcgactctgaagaagagcaagaagatgaggaagaaattgatgtggtgtctgtggagaagaggcaaacccctgccaagaggtcggagtcgggctcatctccatcccgaggccacagcaaacctccgcacagcccactggtcctcaagaggtgccacgtctccactcaccagcacaactacgccgcacccccctccacaaggaaggactatccagctgccaagagggccaagttggacagtggcagggtcctgaagcagatcagcaacaaccgcaagtgctccagccccaggtcctcagacacggaggaaaacgacaagaggcggacacacaacgtcttggaacgtcagaggaggaacgagctgaagcgcagcttttttgccctgcgtgaccagatccctgaattggaaaacaacgaaaaggcccccaaggtagtgatcctcaaaaaagccaccgcctacatcctgtccattcaagcagacgagcacaagctcacctctgaaaaggacttattgaggaaacgacgagaacagttgaaacacaaactcgaacagcttcgaaactctggtgcataaactgacctaactcgaggaggagctggaatctctcgtgagagtaaggagaacggttccttctgacagaactgatgcgctggaattaaaatgcatgctcaaagcctaacctcacaaccttggctggggctttgggactgtaagcttcagccataattttaactgcctcaaacttaaatagtataaaagaactttttttatgcttcccatcttttttctttttccttttaacagatttgtatttaattgtttttttaaaaaaatcttaaaatctatccaattttcccatgtaaatagggccttgaaatgtaaataactttaataaaacgtttataacagttacaaaagattttaagacatgtaccataatttttttt

SEQ ID NO: 253 - DNA, 702 bp, HUMAN
ttccggtacctgtgagtcagctaggggagggcagctctcacccaggctgatagttcggtgacctggctttatctactggatgagttccgctgggagatggaacatagcacgtttctctctggcctggtactggctacccttctctcgcaagtgagccccttcaagatacctatagaggaacttgaggacagagtgtttgtgaattgcaataccagcatcacatgggtagagggaacggtgggaacactgctctcagacattacaagactggacctgggaaaacgcatcctggacccacgaggaatatataggtgtaatgggacagatatatacaaggacaaagaatctaccgtgcaagttcattatcgaatgtgccagagctgtgtggagctggatccagccaccgtggctggcatcattgtcactgatgtcattgccactctgctccttgctttgggagtcttctgctttgctggacatgagactggaaggctgtctggggctgccgacacacaagctctgttgaggaatgaccaggtctatcagcccctccgagatcgagatgatgctcagtacagccaccttggaggaaactgggctcggaacaagtgaacctgagactggtggcttctagaagcagccattaccaactgtaccttcccttcttgctcagccaataaatatatcctctttcactcaaaa

SEQ ID NO: 254 - DNA, 1536 bp, HUMAN
ggggggggggggaccacttggcctgcctccgtcccgccgcgccacttggcctgcctccgtcccgccgcgccacttcgcctgcctccgtcccccgcccgccgcgccatgcctgtggccggctcggagctgccgcgccggcccttgccccccgccgcacaggagcgggacgccgagccgcgtccgccgcacggggagctgcagtacctggggcagatccaacacatcctccgctgcggcgtcaggaaggacgaccgcacgggcaccggcaccctgtcggtattcggcatgcaggcgcgctacagcctgagagatgaattccctctgctgacaaccaaacgtgtgttctggaagggtgttttggaggagttgctgtggtttatcaagggatccacaaatgctaaagagctgtcttccaagggagtgaaaatctgggatgccaatggatcccgagactttttggacagcctgggattctccaccagagaagaaggggacttgggcccagtttatggcttccagtggaggcattttggggcagaatacagagatatggaatcagattattcaggacagggagttgaccaactgcaaagagtgattgacaccatcaaaaccaaccctgacgacagaagaatcatcatgtgcgcttggaatccaagagatcttcctctgatggcgctgcctccatgccatgccctctgccagttctatgtggtgaacagtgagctgtcctgccagctgtaccagagatcgggagacatgggcctcggtgtgcctttcaacatcgccagctacgccctgctcacgtacatgattgcgcacatcacgggcctgaagccaggtgactttatacacactttgggagatgcacatatttacctgaatcacatcgagccactgaaaattcagcttcagcgagaacccagacctttcccaaagctcaggattcttcgaaaagttgagaaaattgatgacttcaaagctgaagactttcagattgaagggtacaatccgcatccaactattaaaatggaaatggctgtttagggtgctttcaaaggagcttgaaggatattgtcagtctttaggggttgggctggatgccgaggtaaaagttctttttgctctaaaagaaaaaggaactaggtcaaaaatctgtccgtgacctatcagttattaatttttaaggatgttgccactggcaaatgtaactgtgccagttctttccataataaaaggctttgagttaactcactgagggtatctgacaatgctgaggttatgaacaaagtgaggagaatgaaatgtatgtgctcttagcaaaaacatgtatgtgcatttcaatcccacgtacttataaagaaggttggtgaatttcacaagctatttttggaatatttttagaatattttaagaatttcacaagctattccctcaaatctgagggagctgagtaacaccatcgatcatgatgtagagtgtggttatgaactttatagttgttttatatgttgctataataaagaagtgttctgc

SEQ ID NO: 255 - DNA, 12072 bp, HUMAN
ctacacacttcttgaaggcaaaggcaatgctgaagtcacctttcatgttcaaatcatattaaaaagttagcaagatgtaattatcagtgtactatgtaaatctttgtgaatgatcaataattacatattttcattatatatattttagtagataatatttatatacattcaacattctaaatatagaaagtttacagagaaaaataaagcctttttttccaatcctgtcctccacctctgcatcccattcttcttcacagaggcaactgattcaagtcattacatagttattgagtgttaactacaactatgttaagtacagctatatatgttagatgccgtagccacagaaatcagtttacaatctaatgcagtggatacagcatgtatacatataatataaggttgctacaaatgctatctgaggtagagctgtttgaaagaatactaatacttaaatgtttaattcaactgacttgattgacaactgattagctgagtggaaaagatggatgagaaagattgtgagacttaattggctggtggtatggtgatatgattgacaataactgctaagtcagagagggatatattaaggaggagaagaaaagcaacaaatctggttttgatgtgttcactttgttataattattgattatttactgaatatgaatatttatctttgtttttgagtcaataaatatacctttgtaaagacagaattaaagtattagtatttctttcaaactggaggcatttctcccactaacatatttcatcaaaacttataataagcttggttccagaggaagaaatgagggataaccaaaaatagagacattaataatagtgtaacgcccagtgataaatctcaataggcagtgatgacagacatgttttcccaaacacaaggatgctgtaagggccaaacagaaatgatggcccctccccagcacctcattttgccccttccttcagctatgcctctactctcctttagatacaagggaggtggatttttctcttctctgagatagcttgatggaaccacaggaacaatgaagtgggctcctggctcttttctctgtggcagatggggtgccatgcccaccttcagacaaagggaagattgagctcaaaagctccctgagaagtgagagcctatgaacatggttgacacagagggacaggaatgtatttccagggtcattcattcctgggaatagtgaactgggacatgggggaagtcagtctcctcctgccacagccacagattaaaaataataatgttaactgatccctaggctaaaataatagtgttaactgatccctaagctaagaaagttcttttggtaattcaggtgatggcagcaggacccatcttaaggatagactaggtttgcttagttcgaggtcatatctgtttgctctcagccatgtactggaagaagttgcatcacacagcctccaggactgccctcctcctcacagcaatggataatgcttcactagcctttgcagataattttggatcagagaaaaaaccttgagctgggccaaaaaggaggagcttcaacctgtgtgcaaaatctgggaacctgacagtataggttgggggccaggatgaggaaaaaggaacgggaaagacctgcccacccttctggtaaggaggccccgtgatcagctccagccatttgcagtcctggctatcccaggagcttacataaagggacaattggagcctgagaggtgacagtgctgacactacaaggctcggagctccgggcactcagacatcatgagttggtccttgcacccccggaatttaattctctacttctatgctcttttatttctctcttcaacatgtgtagcagtaagtgtgctcttcacaaaacgttgtttaaaatggaaagctggaaaataaaacagataataaactagtgaaattttcgtattttttctcttttagtatgttgctaccagagacaactgctgcatcttagatgaaagattcgtaagtagtttttatgtttctccctttgtgtgtgaactggagaggggcagaggaatagaaataattccctcataaatatcatctggcacttgtaactttttaaaaacatagtctaggttttacctatttttcttaatagattttaagagtagcatctgtctacatttttaatcactgttatattttcagggtagttattgtccaactacctgtggcattgcagatttcctgtctacttatcaaaccaaagtagacaaggatctacagtctttggaagacatcttacatcaagttgaaaacaaaacatcagaagtcaaacagctgataaaagcaatccaactcacttataatcctgatgaatcatcaaaaccaagtgagaaaataaagactactgaccaaaaaataataataataatctgtgaagttcttttgctgttgttttagttgttctatttgcttaaggatttttatgtctctgatcctatattacagatatgatagacgctgctactttgaagtccaggataatgttagaagaaattatgaaatatgaagcatcgattttaacacatgactcaagtattcggtaaggatttttgttttaatttgctctgcaagactgatttagtttttatttaatattctatacttgagtgaaagtaatttttaatgtgttttccccatttataatatcccagtgacattatgcctgattatgttgagcatagtagagatagaagtttttagtgcaatataaattatactgggttataattgcttattaataatcacattgaagaaagatgttctagatgtcttcaaatgctagtttgaccatatttatcaaaaattttttccccatcccccatttatcttacaacataaaatcaatctcataggaatttgggtgttgaaaataaaatcctctttataaaaatgctgacaaattggtggttaaaaaaattagcaagcagaggcatagtaaggattttggctcctaaagtaaattatattgaatgtggagcaggaagaaacatgtcttgagagactaagtgtggcaaatattgcaaagctcatattgatcattgcagaatgaacctgcatagtctcttcccttcatttggaagtgaatgtctctgttaaagcttctcagggactcataaactttctgaacataaggtctcagatacagttttaatatttttccccaatttttttttctgaatttttctcaaagcagcttgagaaattgagataaatagtagctagggagaagtggcccaggaaagatttctcctctttttgctatcagagggcccttgttattattgttattattattacttgcattattattgtccatcattgaagttgaaggaggttattgtacagaaattgcctaagacaaggtagagggaaaacgtggacaaatagtttgtctacccttttttacttcaaagaaagaacggtttatgcattgtagacagttttctatcatttttggatatttgcaagccaccctgtaagtaactacaaaaggagggtttttacttcccccagtccattcccaaagctatgtaaccagaagcattaaagaagaaaggggaagtatctgttgttttattttacatacaataacgttccagatcatgtccctgtgtaagttatattttagattgaagcttatatgtatagcctcagtagatccacaagtgaaaggtatactccttcagcacatgtgaattactgaactgagcttttcctgcttctaaagcatcagggggtgttcctattaaccagtctcgccactcttgcaggttgctatctgctgtcccttatgcataaagtaaaaagcaaaatgtcaatgacatttgcttattgacaaggactttgttatttgtgttgggagttgagacaatatgccccattctaagtaaaaagattcaggtccacattgtattcctgttttaattgattttttgatttgtttttctttttcaaaaagtttataattttaattcatgttaatttagtaatataattttacattttcctcaagaatggaataatttatcagaaagcacttcttaagaaaatacttagcagtttccaaagaaaatataaaattactcttctgaaaggaatacttatttttgtcttcttatttttgttatcttatgtttctgtttgtagatatttgcaggaaatatataattcaaataatcaaaagattgttaacctgaaagagaaggtagcccagcttgaagcacagtgccaggaaccttgcaaagacacggtgcaaatccatgatatcactgggaaaggtaactgatgaaggttatattgggattaggttcatcaaagtaagtaatgtaaaggagaaagtatgtactggaaagtataggaatagtttagaaagtggctacccattaagtctaagaatttcagttgtctagacctttcttgaatagctaaaaaaaacagtttaaaaggaatgctgatgtgaaaagtaagaaaattattcttggaaaatgaatagtttactacatgttaaaagctatttttcaaggctggcacagtcttacctgcatttcaaaccacagtaaaagtcgattctccttctctagattgtcaagacattgccaataagggagctaaacagagcgggctttactttattaaacctctgaaagctaaccagcaattcttagtctactgtgaaatcgatgggtctggaaatggatggactgtgtttcagaaggtaattttttccccaccatgtgtatttaataaattcctacattgtttctgccatatggcagatacttttctaagcaccttgtgaaccgtagctcatttaatccttgcaatagccctaagaggaaggtacttctgttactcctatttacagaaaaggaaactgaggcacacaaggttaaataacttgcccaagaccacataactaataagcaacagagtcagcatttgaacctaggcagtatagtttcagagtttgtgacttgactctatattgtactggcactgactttgtagattcatggtggcacataatcatagtaccacagtgacaaataaaaagaaggaaactcttttgtcaggtaggtcaagacctgaggtttcccatcacaagatgaggaagcccaacaccaccccccaccaccccaccaccatcaccaccctttcacacaccagaggatacacttgggctgctccaagacaaggaacctgtgttgcatctgccacttgctgatacccactaggaatcttggctcctttactttctgtttacctcccaccactgttataactgtttctacagggggcgctcagagggaatgaatggtggaagcattagttgccagacaccgattgagcaatgggttccatcataagtgtaagaatcagtaatatccagctagagttctgaagtcgtctaggtgtctttttaatattaccactcatttagaatttatgatgtgccagaaaccctcttaagtatttctcttatattctctctcatgatccttgcagcaaccctaagaagtaaccatcatttttcctatttgatacatgaggaaactgaggtagcttggccaagatcacttagttgggagttgatagaaccagtgctctgtatttttgacaaaatgttgacagcattctctttacatgcattgatagtctattttctccttttgctcttgcaaatgtgtaattagagacttgatggcagtgtagatttcaagaaaaactggattcaatataaagaaggatttggacatctgtctcctactggcacaacagaattttggctgggaaatgagaagattcatttgataagcacacagtctgccatcccatatgcattaagagtggaactggaagactggaatggcagaaccaggtactgttttgaaatgacttccaactttttattgtaaagattgcctggaatgtgcactttccaactatcaatagacaatggcaaatgcagcctgacaaatgcaaacagcacatccagccaccattttctccaggagtctgtttggttcttgggcaatccaaaaaggtaaattctattcaggatgaatctaagtgtattggtacaatctaattaccctggaaccattcagagtaatagctaattactgaacttttaatcagtcccaggaattgagcataaaattataattttatctagtctaaattactatttcatgaagcaggtattattattaatcccattttatagattaacttgctcaaagtcacattgctgataagtggtagaggtagaattcagactcaagtagtttaactttagagcctgtcctcttaacaactatcctggttgaaaagcaaatacagcctcttcagacttctcagtgccttgatggccatttattctgtcaaatcatgagctaccctaaaagtaaaccagctagctcttttgatgatctagaggcttctttttgcttgagatatttgaaggttttaagcattgttacctaattaaaatgcagaaaaatatccaaccctcttgttatgtttaaggaatagtgaaatatattgtcttcaaacacatggacttttttttattgcttggttggtttttaatccagaaagtgctatagtcagtagaccttcttctaggaaaggaccttccatttcccagccactggagattagaaaataagctaaatattttctggaaatttctgttcattcattaaggcccatcctttcccccactctatagaagtgttgtccacttgcacaattttttccaggaaagaatctctctaactccttcagctcacatgctttggaccacacagggaagactttgattgtgtaatgccctcagaagctctccttcttgccactaccacactgatttgaggaagaaaatccctttagcacctaacccttcaggtgctatgagtggctaatggaactgtacctccttcaagttttgtgcaataattaagggtcactcactgtcagatactttctgtgatctatgataatgtgtgtgcaacacataacatttcaataaaagtagaaaatatgaaattagagtcatctacacatctggatttgatcttagaatgaaacaagcaaaaaagcatccaagtgagtgcaattattagttttcagagatgcttcaaaggcttctaggcccatcccgggaagtgttaatgagctgtggactggttcacatatctattgcctcttgccagatttgcaaaaaacttcactcaatgagcaaatttcagccttaagaaacaaagtcaaaaattccaaggaagcatcctacgaaagagggaacttctgagatccctgaggagggtcagcatgtgatggttgtatttccttcttctcagtactgcagactatgccatgttcaaggtgggacctgaagctgacaagtaccgcctaacatatgcctacttcgctggtggggatgctggagatgcctttgatggctttgattttggcgatgatcctagtgacaagtttttcacatcccataatggcatgcagttcagtacctgggacaatgacaatgataagtttgaaggcaactgtgctgaacaggatggatctggttggtggatgaacaagtgtcacgctggccatctcaatggagtttattaccaaggtatgttttcctttcttagattccaagttaatgtatagtgtatactattttcataaaaaataataaatagatatgaagaaatgaagaataatttataaagatagtagggattttatcatgttctttatttcaactaagttctttgaaactggaagtggataataccaagttcatgcctaaaattagcccttctaaagaaatccacctgctgcaaaatatccagtagtttggcattatatgtgaaactatcaccatcatagctggcactgtgggttgtgggatctcctttagacatacaacataaatgatctggatggattaacattactacatggatgcttgttgacacattaacctggcttcccatgagctttgtgtcagatacacgcagtgaacaggtgtttggaggaacagaataaagagaaggcaagcactggtaagggcaggggtttgtgaaagcttgagagaagagaccagtctgaggacagtagacacttattttaggatgggggttggatgaggaggctatagtttgctataagcttggaatggtttggaacactggtttcactcacctacccagcagttatgtgtggggaagccttaccgatgctaaaggatccatgttacaataatggcattatttggaaatcccagtggtattccatgaataaaaccactatgaagataatcccactcaacagactctccgttggagaaggacagcaacaccaccctgggaaagccaaacagtcagaccagacctgtttagcatcagtaggacttccctaccatatctgctgggtagatgagtgaaaccagtgttccaaaccactccgggcttgtagcaaaccatagtctcctcatctaccaagatgagcaaccttacctcctgatgtcctagccaatcaccaactaggaaactttgcacagtttatttaaagtaacagtttgattttcacaatatttttaaattggagaaacataacttatctttgcactcacaaaccacataatgagaagaaactctaagggaaaatgcttgatctgtgtgacccggggcgccatgccagagctgtagttcatgccagtgttgtgctctgacaagccttttacagaattacatgagatctgcttccctaggacaaggagaaggcaaatcaacagaggctgcactttaaaatggagacataaaataacatgccagaaccatttcctaaagctcctcaatcaaccaacaaaattgtgctttcaaataacctgagttgacctcatcaggaattttgtggctccttctcttctaacctgcctgaagaaagatggtccacagcagctgagtccgggatggataagcttagggacagaggccaattagggaactttgggtttctagccctactagtagtgaataaatttaaagtgtggatgtgactatgagtcacagcacagatgttgtttaataatatgtttattttataaattgatattttaggaatctttggagatattttcagttagcagataatactataaattttatgtaactggcaatgcacttcgtaatagacagctcttcatagacttgcagaggtaaaaagattccagaataatgatatgtacatctacgacttgttttaggtggcacttactcaaaagcatctactcctaatggttatgataatggcattatttgggccacttggaaaacccggtggtattccatgaagaaaaccactatgaagataatcccattcaacagactcacaattggagaaggacagcaacaccacctggggggagccaaacaggtcagaccagagcaccctgcggaaacagaatatgactcactttaccctgaggatgatttgtagaaaattaactgctaacttctattgacccacaaagtttcagaaattctctgaaagtttcttccttttttctcttactatatttattgatttcaagtcttctattaaggacatttagccttcaatggaaattaaaactcatttaggactgtatttccaaattactgatatcagagttatttaaaaattgtttatttgaggagataacatttcaactttgttcctaaatatataataataaaatgattgactttatttgcatttttatgaccacttgtcatttattttgtcttcgtaaattattttcattatatcaaatattttagtatgtacttaataaaataggagaacattttagagtttcaaattcccaggtattttccttgtttattacccctaaatcattcctatttaattcttctttttaaatggagaaaattatgtctttttaatatggtttttgttttgttatatattcacaggctggagacgtttaaaagaccgtttcaaaagagatttacttttttaaaggactttatctgaacagagagatataatatttttcctattggacaatggacttgcaaagcttcacttcattttaagagcaaaagaccccatgttgaaaactccataacagttttatgctgatgataatttatctacatgcatttcaataaaccttttgtttcctaagactagatacatggtacctttattgaccattaaaaaaccaccactttttgccaatttaccaattacaattgggcaaccatcagtagtaattgagtcctcattttatgctaaatgttatgcctaactctttgggagttacaaaggaaatagcaattatggcttttgccctctaggagatacaggacaaatacaggaaaatacagcaacccaaactgacaatactctatacaagaacataatcactaagcaggagtcacagccacacaaccaagatgcatagtatccaaagtgcagctgtgtgcaaattaacagtcctaactggtatagagcacctagtccagtgacctgctgggtaaactgtggatgatggttgcaaaagactaatttaaaaaataactaccaagaggccctgtctgtacctaacgccctatttttgcaatggctatatggcaagaaagctggtaaactatttgtctttcaggaccttttgaagtagtttgtataacttcttaaaagttgtgattccagataaccagctgtaacacagctgagagacttttaatcagacaaagtaattcctctcactaaactttacccaaaaactaaatctctaatatggcaaaaatggctagacacccattttcacattcccatctgtcaccaattggttaatctttcctgatggtacaggaaagctcagctactgatttttgtgatttagaactgtatgtcagacatccatgtttgtaaaactacacatccctaatgtgtgccatagagtttaacacaagtcctgtgaatttcttcactgttgaaaattattttaaacaaaatagaagctgtagtagccctttctgtgtgcaccttaccaactttctgtaaactcaaaacttaacatatttactaagccacaagaaatttgatttctattcaaggtggccaaattatttgtgtaatagaaaactgaaaatctaatattaaaaatatggaacttctaatatatttttatatttagttatagtttcagatatatatcatattggtattcactaatctgggaagggaagggctactgcagctttacatgcaatttattaaaatgattgtaaaatagcttgtatagtgtaaaataagaatgatttttagatgagattgttttatcatgacatgttatatattttttgtaggggtcaaagaaatgctgatggataacctatatgatttatagtttgtacatgcattcatacaggcagcgatggtctcagaaaccaaacagtttgctctaggggaagagggagatggagactggtcctgtgtgcagtgaaggttgctgaggctctgacccagtgagattacagaggaagttatcctctgcctcccattctgaccacccttctcattccaacagtgagtctgtcagcgcaggtttagtttactcaatctccccttgcactaaagtatgtaaagtatgtaaacaggagacaggaaggtggtgcttacatccttaaaggcaccatctaatagcgggttactttcacatacagccctcccccagcagttgaatgacaacagaagcttcagaagtttggcaatagtttgcatagaggtaccagcaatatgtaaatagtgcagaatctcataggttgccaataatacactaattcctttctatcctacaacaagagtttatttccaaataaaatgaggacatgtttttgttttctttgaatgctttttgaatgttatttgttattttcagtattttggagaaattatttaataaaaaaacaatcatttgctttttg

SEQ ID NO: 256 - DNA, 3148 bp, HUMAN
gaattcccgcggagcagcgtgcgcggggccccgggagacggcggcggtagcggcgcgggcagagcaaggacgcggcggatcccactcgcacagcagcgcactcggtgccccgcgcagggtcgcgatgctgcccggtttggcactgctcctgctggccgcctggacggctcgggcgctggaggtacccactgatggtaatgctggcctgctggctgaaccccagattgccatgttctgtggcagactgaacatgcacatgaatgtccagaatgggaagtgggattcagatccatcagggaccaaaacctgcattgataccaaggaaggcatcctgcagtattgccaagaagtctaccctgaactgcagatcaccaatgtggtagaagccaaccaaccagtgaccatccagaactggtgcaagcggggccgcaagcagtgcaagacccatccccactttgtgattccctaccgctgcttagttggtgagtttgtaagtgatgcccttctcgttcctgacaagtgcaaattcttacaccaggagaggatggatgtttgcgaaactcatcttcactggcacaccgtcgccaaagagacatgcagtgagaagagtaccaacttgcatgactacggcatgttgctgccctgcggaattgacaagttccgaggggtagagtttgtgtgttgcccactggctgaagaaagtgacaatgtggattctgctgatgcggaggaggatgactcggatgtctggtggggcggagcagacacagactatgcagatgggagtgaagacaaagtagtagaagtagcagaggaggaagaagtggctgaggtggaagaagaagaagccgatgatgacgaggacgatgaggatggtgatgaggtagaggaagaggctgaggaaccctacgaagaagccacagagagaaccaccagcattgccaccaccaccaccaccaccacagagtctgtggaagaggtggttcgagaggtgtgctctgaacaagccgagacggggccgtgccgagcaatgatctcccgctggtactttgatgtgactgaagggaagtgtgccccattcttttacggcggatgtggcggcaaccggaacaactttgacacagaagagtactgcatggccgtgtgtggcagcgccattcctacaacagcagccagtacccctgatgccgttgacaagtatctcgagacacctggggatgagaatgaacatgcccatttccagaaagccaaagagaggcttgaggccaagcaccgagagagaatgtcccaggtcatgagagaatgggaagaggcagaacgtcaagcaaagaacttgcctaaagctgataagaaggcagttatccagcatttccaggagaaagtggaatctttggaacaggaagcagccaacgagagacagcagctggtggagacacacatggccagagtggaagccatgctcaatgaccgccgccgcctggccctggagaactacatcaccgctctgcaggctgttcctcctcggcctcgtcacgtgttcaatatgctaaagaagtatgtccgcgcagaacagaaggacagacagcacaccctaaagcatttcgagcatgtgcgcatggtggatcccaagaaagccgctcagatccggtcccaggttatgacacacctccgtgtgatttatgagcgcatgaatcagtctctctccctgctctacaacgtgcctgcagtggccgaggagattcaggatgaagttgatgagctgcttcagaaagagcaaaactattcagatgacgtcttggccaacatgattagtgaaccaaggatcagttacggaaacgatgctctcatgccatctttgaccgaaacgaaaaccaccgtggagctccttcccgtgaatggagagttcagcctggacgatctccagccgtggcattcttttggggctgactctgtgccagccaacacagaaaacgaagttgagcctgttgatgcccgccctgctgccgaccgaggactgaccactcgaccaggttctgggttgacaaatatcaagacggaggagatctctgaagtgaagatggatgcagaattccgacatgactcaggatatgaagttcatcatcaaaaattggtgttctttgcagaagatgtgggttcaaacaaaggtgcaatcattggactcatggtgggcggtgttgtcatagcgacagtgatcgtcatcaccttggtgatgctgaagaagaaacagtacacatccattcatcatggtgtggtggaggttgacgccgctgtcaccccagaggagcgccacctgtccaagatgcagcagaacggctacgaaaatccaacctacaagttctttgagcagatgcagaactagacccccgccacagcagcctctgaagttggacagcaaaaccattgcttcactacccatcggtgtccatttatagaataatgtgggaagaaacaaacccgttttatgatttactcattatcgccttttgacagctgtgctgtaacacaagtagatgcctgaacttgaattaatccacacatcagtaatgtattctatctctctttacattttggtctctatactacattattaatgggttttgtgtactgtaaagaatttagctgtatcaaactagtgcatgaatagattctctcctgattatttatcacatagccccttagccagttgtatattattcttgtggtttgtgacccaattaagtcctactttacatatgctttaagaatcgatgggggatgcttcatgtgaacgtgggagttcagctgcttctcttgcctaagtattcctttcctgatcactatgcattttaaagttaaacatttttaagtatttcagatgctttagagagattttttttccatgactgcattttactgtacagattgctgcttctgctatatttgtgatataggaattaagaggatacacacgtttgtttcttcgtgcctgttttatgtgcacacattaggcattgagacttcaagcttttctttttttgtccacgtatctttgggtctttgataaagaaaagaatccctgttcattgtaagcacttttacggggcgggtggggaggggtgctctgctggtcttcaattaccaagaattc

SEQ ID NO: 257 - DNA, 3614 bp, HUMAN
gtccgccaaaacctgcgcggatagggaagaacagcaccccggcgccgattgccgtaccaaacaagcctaacgtccgctgggccccggacgccgcgcggaaaagatgaatttacaaccaattttctggattggactgatcagttcagtttgctgtgtgtttgctcaaacagatgaaaatagatgtttaaaagcaaatgccaaatcatgtggagaatgtatacaagcagggccaaattgtgggtggtgcacaaattcaacatttttacaggaaggaatgcctacttctgcacgatgtgatgatttagaagccttaaaaaagaagggttgccctccagatgacatagaaaatcccagaggctccaaagatataaagaaaaataaaaatgtaaccaaccgtagcaaaggaacagcagagaagctcaagccagaggatattcatcagatccaaccacagcagttggttttgcgattaagatcaggggagccacagacatttacattaaaattcaagagagctgaagactatcccattgacctctactaccttatggacctgtcttattcaatgaaagacgatttggagaatgtaaaaagtcttggaacagatctgatgaatgaaatgaggaggattacttcggacttcagaattggatttggctcatttgtggaaaagactgtgatgccttacattagcacaacaccagctaagctcaggaacccttgcacaagtgaacagaactgcaccaccccatttagctacaaaaatgtgctcagtcttactaataaaggagaagtatttaatgaacttgttggaaaacagcgcatatctggaaatttggattctccagaaggtggtttcgatgccatcatgcaagttgcagtttgtggatcactgattggctggaggaatgttacacggctgctggtgttttccacagatgccgggtttcactttgctggagatgggaaacttggtggcattgttttaccaaatgatggacaatgtcacctggaaaataatatgtacacaatgagccattattatgattatccttctattgctcaccttgtccagaaactgagtgaaaataatattcagacaatttttgcagttactgaagaatttcagcctgtttacaaggagctgaaaaacttgatccctaagtcagcagtaggaacattatctgcaaattctagcaatgtaattcagttgatcattgatgcatacaattccctttcctcagaagtcattttggaaaacggcaaattgtcagaaggagtaacaataagttacaaatcttactgcaagaacggggtgaatggaacaggggaaaatggaagaaaatgttccaatatttccattggagatgaggttcaatttgaaattagcataacttcaaataagtgtccaaaaaaggattctgacagctttaaaattaggcctctgggctttacggaggaagtagaggttattcttcagtacatctgtgaatgtgaatgccaaagcgaaggcatccctgaaagtcccaagtgtcatgaaggaaatgggacatttgagtgtggcgcgtgcaggtgcaatgaagggcgtgttggtagacattgtgaatgcagcacagatgaagttaacagtgaagacatggatgcttactgcaggaaagaaaacagttcagaaatctgcagtaacaatggagagtgcgtctgcggacagtgtgtttgtaggaagagggataatacaaatgaaatttattctggcaaattctgcgagtgtgataatttcaactgtgatagatccaatggcttaatttgtggaggaaatggtgtttgcaagtgtcgtgtgtgtgagtgcaaccccaactacactggcagtgcatgtgactgttctttggatactagtacttgtgaagccagcaacggacagatctgcaatggccggggcatctgcgagtgtggtgtctgtaagtgtacagatccgaagtttcaagggcaaacgtgtgagatgtgtcagacctgccttggtgtctgtgctgagcataaagaatgtgttcagtgcagagccttcaataaaggagaaaagaaagacacatgcacacaggaatgttcctattttaacattaccaaggtagaaagtcgggacaaattaccccagccggtccaacctgatcctgtgtcccattgtaaggagaaggatgttgacgactgttggttctattttacgtattcagtgaatgggaacaacgaggtcatggttcatgttgtggagaatccagagtgtcccactggtccagacatcattccaattgtagctggtgtggttgctggaattgttcttattggccttgcattactgctgatatggaagcttttaatgataattcatgacagaagggagtttgctaaatttgaaaaggagaaaatgaatgccaaatgggacacgggtgaaaatcctatttataagagtgccgtaacaactgtggtcaatccgaagtatgagggaaaatgagtactgcccgtgcaaatcccacaacactgaatgcaaagtagcaatttccatagtcacagttaggtagctttagggcaatattgccatggttttactcatgtgcaggttttgaaaatgtacaatatgtataatttttaaaatgttttattattttgaaaataatgttgtaattcatgccagggactgacaaaagacttgagacaggatggttattcttgtcagctaaggtcacattgtgcctttttgaccttttcttcctggactattgaaatcaagcttattggattaagtgatatttctatagcgattgaaagggcaatagttaaagtaatgagcatgatgagagtttctgttaatcatgtattaaaactgatttttagctttacatatgtcagtttgcagttatgcagaatccaaagtaaatgtcctgctagctagttaaggattgttttaaatctgttattttgctatttgcctgttagacatgactgatgacatatctgaaagacaagtatgttgagagttgctggtgtaaaatacgtttgaaatagttgatctacaaaggccatgggaaaaattcagagagttaggaaggaaaaaccaatagctttaaaacctgtgtgccattttaagagttacttaatgtttggtaacttttatgccttcactttacaaattcaagccttagataaaagaaccgagcaattttctgctaaaaagtccttgatttagcactatttacatacaggccatactttacaaagtatttgctgaatggggaccttttgagttgaatttattttattatttttattttgtttaatgtctggtgctttctatcacctcttctaatcttttaatgtatttgtttgcaattttggggtaagacttttttatgagtactttttctttgaagttttagcggtcaatttgcctttttaatgaacatgtgaagttatactgtggctatgcaacagctctcacctacgcgagtcttactttgagttagtgccataacagaccactgtatgtttacttctcaccatttgagttgcccatcttgtttcacactagtcacattcttgttttaagtgcctttagttttaacagttca

SEQ ID NO: 258 - DNA, 1193 bp, HUMAN
tgaagatcagctattagaagagaaagatcagttaagtcctttggacctgatcagcttgatacaagaactactgatttcaacttctttggcttaattctctcggaaacgatgaaatatacaagttatatcttggcttttcagctctgcatcgttttgggttctcttggctgttactgccaggacccatatgtaaaagaagcagaaaaccttaagaaatattttaatgcaggtcattcagatgtagcggataatggaactcttttcttaggcattttgaagaattggaaagaggagagtgacagaaaaataatgcagagccaaattgtctccttttacttcaaactttttaaaaactttaaagatgaccagagcatccaaaagagtgtggagaccatcaaggaagacatgaatgtcaagtttttcaatagcaacaaaaagaaacgagatgacttcgaaaagctgactaattattcggtaactgacttgaatgtccaacgcaaagcaatacatgaactcatccaagtgatggctgaactgtcgccagcagctaaaacagggaagcgaaaaaggagtcagatgctgtttcaaggtcgaagagcatcccagtaatggttgtcctgcctgcaatatttgaattttaaatctaaatctatttattaatatttaacattatttatatggggaatatatttttagactcatcaatcaaataagtatttataatagcaacttttgtgtaatgaaaatgaatatctattaatatatgtattatttataattcctatatcctgtgactgtctcacttaatcctttgttttctgactaattaggcaaggctatgtgattacaaggctttatctcaggggccaactaggcagccaacctaagcaagatcccatgggttgtgtgtttatttcacttgatgatacaatgaacacttataagtgaagtgatactatccagttactgccggtttgaaaatatgcctgcaatctgagccagtgctttaatggcatgtcagacagaacttgaatgtgtcaggtgaccctgatgaaaacatagcatctcaggagatttcatgcctggtgcttccaaatattgttgacaactgtgactgtacccaaatggaaagtaactcatttgttaaaattatcaatatctaatatatatgaataaagtgtaagttcacaact

SEQ ID NO: 259 - DNA, 1676 bp, HUMAN
gaattccgccgctgaccgaggcgtgcaaagactccagaattggaggcatgatgaagactctgctgctgtttgtggggctgctgctgacctgggagagtgggcaggtcctgggggaccagacggtctcagacaatgagctccaggaaatgtccaatcagggaagtaagtacgtcaataaggaaattcaaaatgctgtcaacggggtgaaacagataaagactctcatagaaaaaacaaacgaagagcgcaagacactgctcagcaacctagaagaagccaagaagaagaaagaggatgccctaaatgagaccagggaatcagagacaaagctgaaggagctcccaggagtgtgcaatgagaccatgatggccctctgggaagagtgtaagccctgcctgaaacagacctgcatgaagttctacgcacgcgtctgcagaagtggctcaggcctggttggccgccagcttgaggagttcctgaaccagagctcgcccttctacttctggatgaatggtgaccgcatcgactccctgctggagaacgaccggcagcagacgcacatgctggatgtcatgcaggaccacttcagccgcgcgtccagcatcatagacgagctcttccaggacaggttcttcacccgggagccccaggatacctaccactacctgcccttcagcctgccccaccggaggcctcacttcttctttcccaagtcccgcatcgtccgcagcttgatgcccttctctccgtacgagcccctgaacttccacgccatgttccagcccttccttgagatgatacacgaggctcagcaggccatggacatccacttccacagcccggccttccagcacccgccaacagaattcatacgagaaggcgacgatgaccggactgtgtgccgggagatccgccacaactccacgggctgcctgcggatgaaggaccagtgtgacaagtgccgggagatcttgtctgtggactgttccaccaacaacccctcccaggctaagctgcggcgggagctcgacgaatccctccaggtcgctgagaggttgaccaggaaatacaacgagctgctaaagtcctaccagtggaagatgctcaacacctcctccttgctggagcagctgaacgagcagtttaactgggtgtcccggctggcaaacctcacgcaaggcgaagaccagtactatctgcgggtcaccacggtggcttcccacacttctgactcggacgttccttccggtgtcactgaggtggtcgtgaagctctttgactctgatcccatcactgtgacggtccctgtagaagtctccaggaagaaccctaaatttatggagaccgtggcggagaaagcgctgcaggaataccgcaaaaagcaccgggaggagtgagatgtggatgttgcttttgcaccttacgggggcatcttgagtccagctccccccaagatgagctgcagccccccagagagagctctgcacgtcaccaagtaaccaggccccagcctccaggcccccaactccgcccagcctctccccgctctggatcctgcactctaacactcgactctgctgctcatgggaagaacagaattgctcctgcatgcaactaattcaataaaactgtcttgtgagctgaaaaaaaaaaaaaaaaaaaaaaaaaaggaattc

SEQ ID NO: 260 - DNA, 1650 bp, HUMAN
agcgagccgccacggtatgaccccaggggctctgctgatgctgctgggggcgctggggccgccgctcgccccaggcgtccgcggctcggaggcggagggtcgactccgggagaaacttttctctggctatgatagctccgtgcggccagcgcgggaggtgggagaccgtgtcagggtcagcgttggtctcatcctggcgcaactcatcagcctgaacgagaaggatgaagagatgagcacaaaggtgtacttagacctggagtggactgactacaggctgagctgggaccctgcggagcacgacggcatcgattcgctccgcatcacggcggaatccgtgtggctccctgacgtggtgctactgaacaacaatgatgggaattttgacgtggctctggacattagcgtcgtggtgtcctccgacggctccgtgcgttggcaacccccgggcatctatcgcagcagctgcagcatccaggtcacctacttccccttcgactggcagaattgcactatggtgttcagctcctacagctacgacagctcggaggtcagcctgcagacaggcctgggtcctgacgggcaagggcatcaggaaatccacattcatgaagggactttcattgagaatggccagtgggagaatatccacaagccctctcggctaatccagcctccaggcgatcctaggggagggagggaaggacagcgccaggaagtcatcttctacctcatcatccgccgcaagcctctcttctacctggtcaacgtcattgccccatgcatcctcatcactcttctggccatcttcgtcttctacctgccaccagatgcaggagagaagatggggctctcaatctttgccctgctgacccttactgtgttcctgctgctgctggctgacaaagtacctgagacctcactatcagtacccattattatcaagtacctcatgtttaccatggtcctcgtcaccttctcagtcatccttagtgtcgtggttctcaacctgcaccaccgctcaccccacacccaccaaatgcccctttgggtccgtcagatcttcattcacaaacttccgctgtacctgcgtctaaaaaggcccaaacccgagagagacctgatgccggagccccctcactgttcttctccaggaagtggctggggtcggggaacagatgaatatttcatccggaagccgccaagtgattttctcttccccaaacccaataggttccagcctgaactgtctgcccctgatctgcggcgatttatcgatggtccaaaccgggctgtggccctgcttccggagctacgggaggtcgtctcctctatcagctacatcgctcgacagctgcaggaacaggaggaccacgatgcgctgaaggaggactggcagtttgtggccatggtagtggaccgcctcttcctgtggactttcatcatcttcaccagcgttgggaccctagtcatcttcctggacgccacgtaccacttgccccctccagacccctttccttgaagactggagggttgagaccaggccccctgccagttgaagtgagagagtttggtgatactgtcaagccctatccttctctgcctcttaactccttcacgaggaatctgggcctcttatttcgttctggg

SEQ ID NO: 261 - DNA, 1041 bp, HUMAN
ctaaagatctccctccaggcagcccttggctggtccctgcgagcccgtggagactgccagagatgtcctctttcggttacaggaccctgactgtggccctcttcaccctgatctgctgtccaggatcggatgagaaggtattcgaggtacacgtgaggccaaagaagctggcggttgagcccaaagggtccctcgaggtcaactgcagcaccacctgtaaccagcctgaagtgggtggtctggagacctctctaaataagattctgctggacgaacaggctcagtggaaacattacttggtctcaaacatctcccatgacacggtcctccaatgccacttcacctgctccgggaagcaggagtcaatgaattccaacgtcagcgtgtaccagcctccaaggcaggtcatcctgacactgcaacccactttggtggctgtgggcaagtccttcaccattgagtgcagggtgcccaccgtggagcccctggacagcctcaccctcttcctgttccgtggcaatgagactctgcactatgagaccttcgggaaggcagcccctgctccgcaggaggccacagccacattcaacagcacggctgacagagaggatggccaccgcaacttctcctgcctggctgtgctggacttgatgtctcgcggtggcaacatctttcacaaacactcagccccgaagatgttggagatctatgagcctgtgtcggacagccagatggtcatcatagtcacggtggtgtcggtgttgctgtccctgttcgtgacatctgtcctgctctgcttcatcttcggccagcacttgcgccagcagcggatgggcacctacggggtgcgagcggcttggaggaggctgccccaggccttccggccatagcaaccatgagtggcatggccaccaccacggtggtcactggaactcagtgtgactcctcagggttgaggtccagccctggctgaaggactgtgacaggcagcagagacttgggacattgccttttctagcccgaatacaaacacctggactt

SEQ ID NO: 262 - DNA, 1211 bp, HUMAN
ggccccccccccccctagaaatgctcgaaccaggacggctcctggagtcctcgcgccctcgcagaaggactacgggccccggcgaccccgggggcggggcttccggcgcgctgccttgtgggcacggtagttccgccgggtctggcttccgcctgccgagcggccccggaccgcaggccggactacacttcccgtcggcccgcctgctctcccgatgccgccttggcgcgagacgttggcaagcagagtgtctccaagatggccgcttggggaaggaggcgtcttggcccgggcagcagtggcggcagcgcccgagagagggtgagcttgtcggccacagactgctacattgtgcatgagatctacaatggggagaatgcccaagaccagtttgagtacgagctggagcaggccctggaagcccagtacaagtacattgtgattgagcccactcgcattggcgacgagacagcccgctggatcaccgtgggcaactgcctgcacaagacggccgtgctggcgggcaccgcctgcctcttcaccccgttggcgctgcccttagattattcccactacatttccctgcccgctggtgtgctgagcctggcctgctgcaccctctatgggatctcctggcagtttgacccttgctgcaagtaccaagtggagtacgacgcctataaactgtcgcgcctgcctctgcacacactcacctcctccaccccggtggtgctggtccggaaggacgacctgcacagaaagagactgcacaacacgatagcactggccgccctggtgtactgtgtaaagaagatttacgaactctatgccgtatgatttcagtagaacagggagcgaagcaaaaccacccggcccacaagagacaacagagtattcagatcgccacactctgtgaggcagcagagcctgggcaggtgtttggcttagtatttgttatttttaaaaaataacagatcacgggtgtacccagggtttttcagctcattacactaagatgtggatttccataacccaagaggggggtctgaggctgtggaagtccgactgggcagtggaatgctgatggaggcagacgctgccgagggggtgtggacgtgctttgggggaggtctttaagtctattgtttaactgtaccatccagagcccaccagaagctattgatcattaaaattatgagaatttcaactcc

SEQ ID NO: 263 - DNA, 540 bp, HUMAN
tgcgttttgggggttcctggagtatcaatcatggatcaagaaactgtaggcaatgttgtcctgttggccatcgtcaccctcatcagcgtggtccagaatggattctttgcccataaagtggagcacgaaagcaggacccagaatgggaggagcttccagaggaccggaacacttgcctttgagcgggtctacactgccaaccagaactgtgtagatgcgtaccccactttcctcgctgtgctctggtctgcggggctactttgcagccaagttcctgctgcgtttgctggactgatgtacttgtttgtgcggcaaaagtactttgtcggttacctaggagagagaacgcagagcacccctggctacatatttgggaaacgcatcatactcttcctgttcctcatgtccgttgctggcatattcaactattacctcatcttctttttcggaagtgactttgaaaactacataaagacgatctccaccaccatctcccctctacttctcatttcctaactctctgctgaatatggggttggt

SEQ ID NO: 264 - DNA, 1141 bp, HUMAN
ggaattccgcttaggacagttggctgttaagtgacactgattctccccgccccgcctgacccccgagaaggaggcttgtcccccgctgcgtgagggggtggggaagtgggtagtgaattcggatctacctgggaggggggagtggaagttcccgccccggagagcggcgaggcggcagccacagttgattatggaagattcccacaagagtaccacgtcagagacagcacctcaacctggttcagcagttcagggagctcacatttctcatattgctcaacaggtatcatctttatcagaaagtgaggagtcccaggactcatccgacagcataggctcctcacagaaagcccacgggatcctagcacggcgcccatcttacagaaaaattttgaaagacttatcttctgaagatacacggggcagaaaaggagacggagaaaattctggagtttctgctgctgtcacttctatgtctgttccaactcccatctatcagactagcagcggacagtacattgccattgccccaaatggagccttacagttggcaagtccaggcacagatggagtacagggacttcagacattaaccatgacaaattcaggcagtactcagcaaggtacaactattcttcagtatgcacagacctctgatggacagcagatacttgtgcccagcaatcaggtggtcgtacaaactgcatcaggagatatgcaaacatatcagatccgaactacaccttcagctacttctctgccacaaactgtggtgatgacatctcctgtgactctcacctctcagacaactaagacagatgacccccaattgaaaagagaaataaggttaatgaaaaacagagaagctgctcgagaatgtcgcagaaagaagaaagaatatgtgaaatgcctggaaaaccgagttgcagtcctggaaaatcaaaataaaactctaatagaagagttaaaaactttgaaggatctttattccaataaaagtgtttgattcctaagaaagaaaatatttttgtggacatgcataaaaattaaatggatttcctagtggagttttataaattaaaaggtcaaacatgaagctttttatttaggcttttccaaatcaaggataaatatcttacgc

SEQ ID NO: 265 - DNA, 1766 bp, HUMAN
cgcgccaccgccgccgcccaggccatcgccaccctccgcagccatgtccaccaggtccgtgtcctcgtcctcctaccgcaggatgttcggcggcccgggcaccgcgagccggccgagctccagccggagctacgtgactacgtccacccgcacctacagcctgggcagcgcgctgcgccccagcaccagccgcagcctctacgcctcgtccccgggcggcgtgtatgccacgcgctcctctgccgtgcgcctgcggagcagcgtgcccggggtgcggctcctgcaggactcggtggacttctcgctggccgacgccatcaacaccgagttcaagaacacccgcaccaacgagaaggtggagctgcaggagctgaatgaccgcttcgccaactacatcgacaaggtgcgcttcctggagcagcagaataagatcctgctggccgagctcgagcagctcaagggccaaggcaagtcgcgcctgggggacctctacgaggaggagatgcgggagctgcgccggcaggtggaccagctaaccaacgacaaagcccgcgtcgaggtggagcgcgacaacctggccgaggacatcatgcgcctccgggagaaattgcaggaggagatgcttcagagagaggaagccgaaaacaccctgcaatctttcagacaggatgttgacaatgcgtctctggcacgtcttgaccttgaacgcaaagtggaatctttgcaagaagagattgcctttttgaagaaactccacgaagaggaaatccaggagctgcaggctcagattcaggaacagcatgtccaaatcgatgtggatgtttccaagcctgacctcacggctgccctgcgtgacgtacgtcagcaatatgaaagtgtggctgccaagaacctgcaggaggcagaagaatggtacaaatccaagtttgctgacctctctgaggctgccaaccggaacaatgacgccctgcgccaggcaaagcaggagtccactgagtaccggagacaggtgcagtccctcacctgtgaagtggatgcccttaaaggaaccaatgagtccctggaacgccagatgcgtgaaatggaagagaactttgccgttgaagctgctaactaccaagacactattggccgcctgcaggatgagattcagaatatgaaggaggaaatggctcgtcaccttcgtgaataccaagacctgctcaatgttaagatggcccttgacattgagattgccacctacaggaagctgctggaaggcgaggagagcaggatttctctgcctcttccaaacttttcctccctgaacctgagggaaactaatctggattcactccctctggttgatacccactcaaaaaggacacttctgattaagacggttgaaactagagatggacaggttatcaacgaaacttctcagcatcacgatgaccttgaataaaaattgcacacactcagtgcagcaatatattaccagcaagaataaaaaagaaatccatatcttaaagaaacagctttcaagtgcctttctgcagtttttcaggagcgcaagatagatttggaataggaataagctctagttcttaacaaccgacactcctacaagatttagaaaaaagtttacaacataatctagtttacagaaaaatcttgtgctagaatactttttaaaaggtattttgaataccattaaaactgcttttttttttccagcaagtatccaaccaacttggttctgcttcaataaatctttggaaaaacta

SEQ ID NO: 266 - DNA, 1315 bp, HUMAN
gaggcggctgcctgctgctctgcaggtaccatggagctgagctataggctcttcatctgcctcctgctctggggtagtactgagctgtgctacccccaacccctctggctcttgcagggtggagccagccatcctgagacgtccgtacagcccgtactggtggagtgtcaggaggccactctgatggtcatggtcagcaaagacctttttggcaccgggaagctcatcagggctgctgacctcaccttgggcccagaggcctgtgagcctctggtctccatggacacagaagatgtggtcaggtttgaggttggactccacgagtgtggcaacagcatgcaggtaactgacgatgccctggtgtacagcaccttcctgctccatgacccccgccccgtgggaaacctgtccatcgtgaggactaaccgcgcagagattcccatcgagtgccgctaccccaggcagggcaatgtgagcagccaggccatcctgcccacctggttgcccttcaggaccacggtgttctcagaggagaagctgactttctctctgcgtctgatggaggagaactggaacgctgagaagaggtcccccaccttccacctgggagatgcagcccacctccaggcagaaatccacactggcagccacgtgccactgcggttgtttgtggaccactgcgtggccacaccgacaccagaccagaatgcctccccttatcacaccatcgtggacttccatggctgtcttgtcgacggtctcactgatgcctcttctgcattcaaagttcctcgacccgggccagatacactccagttcacagtggatgtcttccactttgctaatgactccagaaacatgatatacatcacctgccacctgaaggtcaccctagctgagcaggacccagatgaactcaacaaggcctgttccttcagcaagccttccaacagctggttcccagtggaaggcccggctgacatctgtcaatgctgtaacaaaggtgactgtggcactccaagccattccaggaggcagcctcatgtcatgagccagtggtccacgtctgcttcccgtaaccgcaggcatgtgacagaagaagcagatgtcaccgtgggggccactgatcttcctggacaggagtggtgaccatgaagtagagcagtgggctttgccttctgacacctcagtggtgctgctgggcgtaggcctggctgtggtggtgtccctgactctgactgctgttatcctggttctcaccaggaggtgtcgcactgcctcccaccctgtgtctgcttccgaataaaagaagaaa

SEQ ID NO: 267 - DNA, 659 bp, HUMAN
gggtacctgtgtggaaagaagcaaccaccactctattttgtgcatcagatgctaaagcatatgatacagaggtacataatgtttgggccacacatgcctgtgtacccacagaccccaacccacaagaaatagtattgaaaaatgtgacagaaaattttaacatgtggaaaaataacatggtagaacagatgcatgaggatataatcagtttatgggatcaaagcctaaaaccatgtgtaaaattaaccccactctgtgttactttaaattgcactgatttgacgaatgctactaataccactagtagtagcgggggaacgatggagggaggagaaataaaaaactgctctttcaatatcaccacaagcataagagataaggtgcagaaagaatatgcactgttttataaacttgatatagtaccaatagataataatactagctataggttgataagttgtaacacctcagtcatcacacaggcctgtccaaaggtatcctttgagccaattcccatacattattgtgccccggctggttttgcgattctaaagtgtaaagataagaagttcaatggaaaaggaccatgtacaaatgtcagcacagtacaatgtacacatggaattaggccagtagtatcaactcaactgctgttaaat

SEQ ID NO: 268 - DNA, 2824 bp, HUMAN
gcggccgctttcgatttcgctttcccctaaatggctgagcttctcgccagcgcaggatcagcctgttcctgggactttccgagagccccgccctcgttccctcccccagccgccagtaggggaggactcggcggtacccggagcttcaggccccaccggggcgcggagagtcccagacccggccgggaccgggacggcgtccgagtgccaatggctagctctaggtgtcccgctccccgcgggtgccgctgcctccccggagcttctctcgcatggctggggacagtactgctacttctcgccgactgggtgctgctccggaccgcgctgccccgcatattctccctgctggtgcccaccgcgctgccactgctccgggtctgggcggtgggcctgagccgctgggccgtgctctggctgggggcctgcggggtcctcagggcaacggttggctccaagagcgaaaacgcaggtgcccagggctggctggctgctttgaagccattagctgcggcactgggcttggccctgccgggacttgccttgttccgagagctgatctcatggggagcccccgggtccgcggatagcaccaggctactgcactggggaagtcaccctaccgccttcgttgtcagttatgcagcggcactgcccgcagcagccctgtggcacaaactcgggagcctctgggtgcccggcggtcagggcggctctggaaaccctgtgcgtcggcttctaggctgcctgggctcggagacgcgccgcctctcgctgttcctggtcctggtggtcctctcctctcttggggagatggccattccattctttacgggccgcctcactgactggattctacaagatggctcagccgataccttcactcgaaacttaactctcatgtccattctcaccatagccagtgcagtgctggagttcgtgggtgacgggatctataacaacaccatgggccacgtgcacagccacttgcagggagaggtgtttggggctgtcctgcgccaggagacggagtttttccaacagaaccagacaggtaacatcatgtctcgggtaacagaggacacgtccaccctgagtgattctctgagtgagaatctgagcttatttctgtggtacctggtgcgaggcctatgtctcttggggatcatgctctggggatcagtgtccctcaccatggtcaccctgatcaccctgcctctgcttttccttctgcccaagaaggtgggaaaatggtaccagttgctggaagtgcaggtgcgggaatctctggcaaagtccagccaggtggccattgaggctctgtcggccatgcctacagttcgaagctttgccaacgaggagggcgaagcccagaagtttagggaaaagctgcaagaaataaagacactcaaccagaaggaggctgtggcctatgcagtcaactcctggaccactagtatttcaggtatgctgctgaaagtgggaatcctctacattggtgggcagctggtgaccagtggggctgtaagcagtgggaaccttgtcacatttgttctctaccagatgcagttcacccaggctgtggaggtactgctctccatctaccccagagtacagaaggctgtgggctcctcagagaaaatatttgagtacctggaccgcacccctcgctgcccacccagtggtctgttgactcccttacacttggagggccttgtccagttccaagatgtctcctttgcctacccaaaccgcccagatgtcttagtgctacaggggctgacattcaccctacgccctggcgaggtgacggcgctggtgggacccaatgggtctgggaagagcacagtggctgccctgctgcagaatctgtaccagcccaccgggggacagctgctgttggatgggaagccccttccccaatatgagcaccgctacctgcacaggcaggtggctgcagtgggacaagagccacaggtatttggaagaagtcttcaagaaaatattgcctatggcctgacccagaagccaactatggaggaaatcacagctgctgcagtaaagtctggggcccatagtttcatctctggactccctcagggctatgacacagaggtagacgaggctgggagccagctgtcagggggtcagcgacaggcagtggcgttggcccgagcattgatccggaaaccgtgtgtacttatcctggatgatgccaccagtgccctggatgcaaacagccagttacaggtggagcagctcctgtacgaaagccctgagcggtactcccgctcagtgcttctcatcacccagcacctcagcctggtggagcaggctgaccacatcctctttctggaaggaggcgctatccgggaggggggaacccaccagcagctcatggagaaaaaggggtgctactgggccatggtgcaggctcctgcagatgctccagaatgaaagccttctcagacctgcgcactccatctccctcccttttcttctctctgtggtggagaaccacagctgcagagtagcagctgcctccaggatgagttacttgaaatttgccttgagtgtgttacctcctttccaagctcctcgtgataatgcagacttcctggagtacaaacacaggatttgtaattcctactgtaacggagtttagagccagggctgatgctttggtgtggccagcactctgaaactgagaaatgttcagaatgtacggaaagatgatcagctattttcaacataactgaaggcatatgctggcccataaacaccctgtaggttcttgatatttataataaaattggtgttttgt

SEQ ID NO: 269 - DNA, 3285 bp, HUMAN
cggctcgctggtaccggcagtgccatggcggccttcagcaagtacttgacggcgcgaaactcctcgctggctggtgccgcgttcctgctgctctgcctgctccacaagcggcgccgcgccctcggcctgcacggtaagaaaagtggaaaaccaccattacagaataatgagaaagaaggaaaaaaagaacgagctgtggtggacaaagtgtttttctcaaggctcatacagatcctgaaaatcatggtccctagaacattttgtaaagagacaggttacttggtacttattgctgttatgctggtgtctcgaacatattgtgatgtttggatgattcaaaatgggacactaattgaaagtggtatcattggtcgtagcaggaaagatttcaagagatacttactcaacttcatcgctgccatgcctcttatctctctggttaataacttcttgaagtatgggttaaatgagcttaaactgtgcttccgagtaaggctcactaaatacctctatgaggagtatcttcaagccttcacatattataaaaaggggaatctggacaacagaatagctaatccagaccagctgcttacacaagatgtagaaaaattttgtaacagtgtagtcgatctgtattcaaatcttagtaagccatttttagacatagttttgtatatctttaagttaacgagtgcaattggagctcagggcccagcgagcatgatggcctacttggttgtttctgggctattcctaactcgacttcgaagacccattggtaagatgacaataactgagcaaaagtatgaaggagaatatagatatgttaattctcggctcatcacaaacagtgaagaaattgccttttacaatgggaataaaagagaaaagcagacagtccactcagtcttccgaaaactggtggaacacctacataatttcattttgtttcggttttcaatgggcttcattgatagtattattgccaaataccttgccactgttgttggttacctagttgtcagtcgccctttcttagatttgtctcatcctcgacatctcaagagtacacattcggaacttctagaggattactaccaaagtggaagaatgcttttgcgaatgtctcaagctctgggtcgaatagttttggctgggcgtgaaatgactagattggccggttttactgctcggattacagaattaatgcaagtactgaaggatttaaatcatggcaaatatgagcgcacaatggtctcacaacaggaaaagggtattgaaggagtacaagtcattcccttgatacctggtgctggagaaatcattattgcagataacattataaagtttgatcatgttcctttagcaacgccaaatggagatgttttgatccgagaccttaattttgaagttcgatctggggctaatgttctaatttgtggtccaaatggctgcggaaagagttcacttttccgtgttcttggtgaattatggcctctttttggaggacgtctaactaaacctgaaagaagaaaattattttatgttcctcagagaccttacatgacccttggaacacttcgagatcaagtgatatatccagatggacgagaagatcagaaaaggaagggaatttctgacctagtacagaaggaatacttagacaatgtccagttgggtcatatccttgaacgtgaaggaggctgggacagtgttcaggattggatggacgtactcagtggtggagaaaagcaaagaatggcgatggcaagattattttatcataaaccccagtttgccattttggatgaatgcacaagtgcagttagtgtcgacgtggaaggctacatttatagtcattgtcgaaaggttggcatcactctcttcactgtgtctcataggaaatctctttggaaacatcatgagtactacctgcatatggatggcagaggcaactatgaattcaaacagataacagaagatacagttgagtttggctcttagagaaatctggagaactatacctgcttcagtgaaataattacagaatatacttagaaaggcaaagtacattgtaaaataaagttgagcttagttttttttaaaaaaaaaaacaaagccaaccaaattatattagatacagaataatggagaacaagttgttaaaacatttaatattatataggatattgctaattgtgtatatgttggtttaattaataatatgtactaagaatgtccttattcttgtggttaaaaacctgcctaaattaaattgggcttcaatcatgtaacctgattcatcctgggatgtaaaccattcgaagtcagctaattggacttttatggctctatcttttccttcatgaagaaccctatttaaaactgggtcatcatttgtcctgttctagcaagatagtcttcagtttcatttcctgtgccctgtggtagttggaaaccatatcataatgtattatttaaatgtttaacatcattgcataacacgtttattatacagtggcagatttctttagctgccacagtaatactcattccttgtgtgtgtcttggagtgcatttgactccaggaaaagccattttggttttccttaactaaatgataaatgtacccctctcagtctgcagtattgagttgtttaaagtatatgtgcagtcttgcttacaaggaggggttaccatgtatcacacctaatcttcccaatgtttgggaatattaaaacaccaacagtccttaacatgccaggctcaaggtcttataagagttctagatttttaagagaattagacaaatttgtgtgtgttagaagcccattcattagaagtgtggtggttatttggtattaaactcaaacagtgccaagcttgggaaggcactacaatgaaataatgcactgagtatgcaatgctatcactgtctttgactgtgattttatgtttaaaaagtatgttctaaaattattatatatacatgggtgaattatgtttccgaggcactgttttatctctgtgaatcttgaataacttttttatatttgggttatgatgtcaaacgatcctaagcgaagatgatttcagttcatcaaatcatcattaatgactttatgtattatttgcacagggagaattgaaactgagtataatcaataagctagatacgaaatcagtttctcaaactgagcttcagaaaggggcattttgtactcttgtttttgcataactggttttgtttttttgcagaattaactataacaatcactggctacg

SEQ ID NO: 270 - DNA, 1004 bp, HUMAN
gcctcgctcgggcgcccagtggtcctgccgcctggtctcacctcgccatggttcgtctgcctctgcagtgcgtcctctggggctgcttgctgaccgctgtccatccagaaccacccactgcatgcagagaaaaacagtacctaataaacagtcagtgctgttctttgtgccagccaggacagaaactggtgagtgactgcacagagttcactgaaacggaatgccttccttgcggtgaaagcgaattcctagacacctggaacagagagacacactgccaccagcacaaatactgcgaccccaacctagggcttcgggtccagcagaagggcacctcagaaacagacaccatctgcacctgtgaagaaggctggcactgtacgagtgaggcctgtgagagctgtgtcctgcaccgctcatgctcgcccggctttggggtcaagcagattgctacaggggtttctgataccatctgcgagccctgcccagtcggcttcttctccaatgtgtcatctgctttcgaaaaatgtcacccttggacaagctgtgagaccaaagacctggttgtgcaacaggcaggcacaaacaagactgatgttgtctgtggtccccaggatcggctgagagccctggtggtgatccccatcatcttcgggatcctgtttgccatcctcttggtgctggtctttatcaaaaaggtggccaagaagccaaccaataaggccccccaccccaagcaggaaccccaggagatcaattttcccgacgatcttcctggctccaacactgctgctccagtgcaggagactttacatggatgccaaccggtcacccaggaggatggcaaagagagtcgcatctcagtgcaggagagacagtgaggctgcacccacccaggagtgtggccacgtgggcaaacaggcagttggccagagagcctggtgctgctgctgcaggggtgcaggcagaagcggggagctatgcccagtcagtgccagcccctc

SEQ ID NO: 271 - DNA, 1677 bp, HUMAN
atggataatctcagtgataccttgaagaagctgaagataacagctgttgacaagactgaggatagtttagaaggatgcttggattgtctgcttcaagccctggctcaaaataatacggaaacaagtgaaaaaatccaagcaagtggaatacttcagctgtttgcaagtctgttgactccacagtcttcctgcaaagccaaagtagctaacatcatagcagaagtagccaaaaatgagtttatgcgaattccatgtgtggatgctggattgatttcaccactggtgcagctgctaaatagcaaagaccaggaagtgctgcttcaaacgggcagggctctaggaaacatatgttacgatagccattcgcttcaagctcagcttatcaatatgggtgttattcctaccttagtgaaattactgggcatccactgccaaaatgcagctcttacagaaatgtgtcttgttgcatttggtaatttagcagaacttgagtcaagtaaagaacagtttgccagtacaaacattgctgaagagctagtaaaactcttcaagaaacaaatcgaacatgataagagagaaatgatttttgaagttcttgctccattggcagaaaatgatgctattaaactacagctggttgaagcaggcctagtagagtgtctactagagattgttcagcaaaaagtggatagtgacaaagaagatgatattactgagctcaaaactggttcagatctcatggttttattacttcttggagatgaatccatgcagaagttatttgaaggaggaaaaggtagtgtatttcaaagggtactctcttggatcccatcaaataaccaccagctacagcttgctggagcattggcaattgcaaattttgccagaaatgatgcaaattgtattcatatggtagacaatgggattgtagaaaaacttatggatttactggacagacatgtagaagatggaaatgtaacagtacagcatgcagcactaagtgccctcagaaacctggccattccagttatagataaagcaaagatgttatcagctggggtcacagaggcagttttgaaatttcttaaatctgaaatgcctcctgttcagttcaaacttctgggaacattaagaatgttaatagatgcacaagcagaagctgctgaacaattgggaaagaatgttaagttagtggagcgtttggtggaatggtgtgaagccaaagatcatgctggtgtgatgggggagtcaaacagactgctgtctgcccttatacgacacagtaaatcaaaagatgtaattaaaaccattgtgcagagtggtggcatcaagcatctagttaccatggcaactagtgaacatgtaataatgcagaatgaagctcttgttgctttggcattaatagcagctttagaattgggcactgctgagaaagatctagaaagtgctaaacttgtacagattttacatagactgctagcagatgagagaagtgctcctgaaatcaaatataattccatggtcctgatatgtgctcttatgggatctgaatgtctacacaaggaagtacaggatttggcttttctagatgtcgtatccaaacttcgcagtcatgagaacaaaagtgttcgccagcaggcctctctcacagagcagagacttactgtggaaagctga

SEQ ID NO: 272 - DNA, 8201 bp, HUMAN
ctaaaaataccattaagtaatagtattagcttttgtattctgagattcaacagcagcagtcacttccctccactcctatgtgtatcccaggaccaccctgggcggggagggctgaggtcagggaggtctgaagctggtcctgggctccgggggtgacagtgatgaggaactgggtgcacacatgagtggggcagccgggcctggccagagaagcaacacacacgtgcacagacatgtttatccacatacacatgtgcacgcatgtgcacaaacacattgcaggcaggcatgttgacgcctcaggcagcggaggaccctgactctgggccctgctgacccgggcaaggcccattgtgatgcgtgccatgacctcagaatgtcactggtgcttagcacctatccgctctccagactgcgtctgtgttctacggcagttacacacacgcagtggtattcacaagcggttttgtggactcaaaggttttctccctgagaggcataacccaggccagctgattcatcagaatcaggtgagtgtgacctgctctcttccctccaggctgacttggggacagtggctatggtatgggcggtgttggcctctgggcagctacagaggagggtcatccctgagcactcaccgggcgcccgttctacactgcccatgtagacgattttctctttcgtcttcatggtggcttcgtagagtgggtgctgttcccaaatgtacccattcgacaggtgagccgtctggggtcagagaggcagtaactggcctgggaatccagacaagaccctgggttttgctctcagccctgctgtgtgccatgctagacttcaggcctcaaccctgagacctccctgctctagatcccaaatctgcccagatttccgatccaatgggcagagcctggccctggcagagacactgggatggatccactgtgggtggggaggagggaagggtcctcagaacacacctggggcctaagctgggtcttgatggtcactgtgggacccactggacacacacagtcccttgtctgggagtggcatggggagccttctgcccttgggcagttgtggaaagtgaaggagccctggagagctggctgaggggagactatcttcccttgtgttcaaaggggtccaggcactggggctctccccaagtatttcttattctgtctggcctcgctttccttttgccctgagtattctcaggagggacggtccatctagatgtcctccaggagcaaggacccactgttcttcatcagtgacccaggaaaatgaagccccctcctgtggggacagctcagaatggtggagtccacagtccctccctgagagacatggtttccatgagcacagtggctgctttggagacagtaatcattttcatccccaaaaccaaacacactcctgctcaaatggtgttattgctaaagcagcttcactggttagactgaagggccatggtagcccaagtgatgagcggggtagaatggagcagtcaggagagatcttgttccccgtaggaaactgggcatctctgtggccctgaacatcccaggaggccgatcgtacagagacctctggtgcctgaccgcagttcacatccacatccctggaatagaccatcacaggctcttcacccttggcaggtggacaccattcaacctgccggggcaggatggacatggtagagaatgcagatagtttgcaggcacaggagcggaaggacatacttatgaagtatgacaagggacaccgagctgggctgccagaggacaaggggcctgagcccgttggaatcaacagcagcattgatcgttttggcattttgcatgagacggagctgcctcctgtgactgcacgggaggcgaagaaaattcggcgggagatgacacgaacgagcaagtggatggaaatgctgggagaatgggagacatataagcacagtagcaaactcatagatcgagtgtacaagggaattcccatgaacatccggggcccggtgtggtcagtcctcctgaacattcaggaaatcaagttgaaaaaccccggaagataccagatcatgaaggagaggggcaagaggtcatctgaacacatccaccacatcgacctggacgtgaggacgactctccggaaccatgtcttctttagggatcgatatggagccaagcagagggaactattctacatcctcctggcctattcggagtataacccggaggtgggctactgcagggacctgagccacatcaccgccttgttcctcctttatctgcctgaggaggacgcattctgggcactggtgcagctgctggccagtgagaggcactccctgccaggattccacagcccaaatggtgggacagtccaggggctccaagaccaacaggagcatgtggtacccaagtcacaacccaagaccatgtggcatcaggacaaggaaggtctatgcgggcagtgtgcctcgttaggctgccttctccggaacctgattgacgggatctctctcgggctcaccctgcgcctgtgggacgtgtatttggtggaaggagaacaggtgttgatgccaataaccagcattgctcttaaggttcagcagaagcgcctcatgaagacatccaggtgtggcctgtgggcacgtctgcggaaccaattcttcgatacctgggccatgaacgatgacaccgtgctcaagcatcttagggcctctacgaagaaactaacaaggaagcaaggggacctgccacccccaggcccaacagccctgggacgaaggtgtgtggcaggaagcccccagccagtctgaaccctgggggcagtcccaggagccacccaccatgccccaacggcttccccatgccaggcagcacacacccctccctctgggatcagcagactacaggcgtgtcgtcagtgtcagaccacaggggccacacagagaccccaaggactccagagatgcagccaaacgcgagcaagggtccttggcacccaggcctgtgccggcttcacgtggtgggaagaccctctgcaaggggtataggcaggcccctccaggcccaccagcccagttccagcggcccatttgctcagcttccccgccatgggcatctcgtttttccacgccctgtcctggtggggctgtccgggaagacacgtaccctgtgggcactcagggtgtgcccagcctggccctggctcagggaggacctcagggttcctggagattcctggagtggaagtcaatgccccggctcccaacggacctggatatagggggcccttggttcccccattatgattttgaacggagctgctgggtccgtgccatatcccaggaggaccagctggccacctgctggcaggctgaacactgcggagaggttcacaacaaagatatgagttggcctgaggagatgtcttttacagcaaatagtagtaaaatagatagacaaaaggttcccacagaaaagggagccacaggtctaagcaacctgggaaacacatgcttcatgaactcaagcatccagtgcgttagtaacacacagccactgacacagtattttatctcagggagacatctttatgaactcaacaggacaaatcccattggtatgaaggggcatatggctaaatgctatggtgatttagtgcaggaactctggagtggaactcagaagagtgttgccccattaaagcttcggcggaccatagcaaaatatgctcccaagtttgatgggtttcagcaacaagactcccaagaacttctggcttttctcttggatggtcttcatgaagatctcaaccgagtccatgaaaagccatatgtggaactgaaggacagtgatggccgaccagactgggaagtagctgcagaggcctgggacaaccatctaagaagaaatagatcaattattgtggatttgttccatgggcagctaagatctcaagtcaaatgcaagacatgtgggcatataagtgtccgatttgaccctttcaattttttgtctttgccactaccaatggacagttacatggacttagaaataacagtgattaagttagatggtactacccctgtacggtatggactaagactgaatatggatgaaaagtacacaggtttaaaaaaacagctgagggatctctgtggacttaattcagaacaaatcctactagcagaagtacatgattccaacataaagaactttcctcaggataaccaaaaagtacaactctcagtgagcggatttttgtgtgcatttgaaattcctgtcccttcatctccaatttcagcttctagtccaacacaaatagatttctcctcttcaccatctacaaatggaatgttcaccctaactaccaatggggacctacccaaaccaatattcatccccaatggaatgccaaacactgttgtgccatgtggaactgagaagaacttcacaaatggaatggttaatggtcacatgccatctcttcctgacagcccctttacaggttacatcattgcagtccaccgaaaaatgatgaggacagaactgtatttcctgtcacctcaggagaatcgccccagcctctttggaatgccattgattgttccatgcactgtgcatacccagaagaaagacctatatgatgcggtttggattcaagtatcctggttagcaagaccactcccacctcaggaagctagtattcatgcccaggatcgtgataactgtatgggctatcaatatccattcactctacgagttgtgcagaaagatgggatctcctgtgcttggtgcccacagtatagattttgcagaggctgtaaaattgattgtggggaagacagagctttcattggaaatgcctatattgctgtggattggcaccccacagcccttcaccttcgctatcaaacatcccaggaaagggttgtagataagcatgagagtgtggagcagagtcggcgagcgcaagccgagcccatcaacctggacagctgtctccgtgctttcaccagtgaggaagagctaggggaaagtgagatgtactactgttccaagtgtaagacccactgcttagcaacaaagaagctggatctctggaggcttccacccttcctgattattcaccttaagcgatttcaatttgtaaatgatcagtggataaaatcacagaaaattgtcagatttcttcgggaaagttttgatccgagtgcttttttggtaccacgagacccggccctctgccagcataaaccactcacaccccagggggatgagctctccaagcccaggattctggcaagagaggtgaagaaagtggatgcgcagagttcggctggaaaagaggacatgctcctaagcaaaagcccatcttcactcagcgctaacatcagcagcagcccaaaaggttctccttcttcatcaagaaaaagtggaaccagctgtccctccagcaaaaacagcagccctaatagcagcccacggactttggggaggagcaaagggaggctccggctgccccagattggcagcaaaaataagccgtcaagtagtaagaagaacttggatgccagcaaagagaatggggctgggcagatctgtgagctggctgacgccttgagccgagggcatatgcgggggggcagccaaccagagctggtcactcctcaggaccatgaggtagctttggccaatggattcctttatgagcatgaagcatgtggcaatggctgtggcgatggctacagcaatggtcagcttggaaaccacagtgaagaagacagcactgatgaccaaagagaagacactcatattaagcctatttataatctatatgcaatttcatgccattcaggaattctgagtgggggccattacatcacttatgccaaaaacccaaactgcaagtggtactgttataatgacagcagctgtgaggaacttcaccctgatgaaattgacaccgactctgcctacattcttttctatgagcagcaggggatagactacgcacaatttctgccaaagattgatggcaaaaagatggcagacacaagcagtacggatgaagactctgagtctgattacgaaaagtactctatgttacagtaaagctaccactctggctgctagacagcttggtggcgagggagatgactccttgtagctgatacttggcaaaagtgtcactgaaagacaagctaaatgtagttattttatcctgttagaacaaaaattctaattaaaatagttaacttgaagagtagaaacaattgtattttgaagtctcatacaagctgtctgatagagaactttcaggcagatcccaccattagcctgtaaacaaaaggtgtggcaccagccacctgggaccaaataagaattgaattgtgcttgtccagatatgaacaaatatgtagtgagtatagagtttaccaataatcataacaaatattaaagatttccttggagtcagaggaaaaaacaaacaattataatgttgtctagggacgacatgatacgctacctcctttttcctgaagttttattccattatattgacaagatggagaaagcaagatcatgaaggtgtgcaaatgattcttacggcatggacaaggatttttcaatttattttttaaactgtttccataccctttctttttcttgctttttgtttttgccattgtgtttacgtttgagacacaaccagtcattggtggcaggggcatagagtggtcagtctgaaagggaggctctcttaagagctatgtgccttccaaccagagggagacccagtagaaagaaaaacatcctgggaaatccagctaccagggccctcccagtggaggcatcttacatttaggctacttcaagtatcctcagaaatgtattctgcacccccggccccgcccatgctgagggaaggggagcagttgccaatatttgcaccatcttcacatgcacatgttgcaacaagagcttctgggaaggtaagcggcatcggagctagatcacgtttcacaattagtggttattcttttctgtgtttgttttgcactttaaaaaagagagaacacatgcaaatgaacttgcttgtgtgtatttgatggctctaagggctataaattacaaacaaaacacatcccagacattaggagttcataagtatatttaatgaaattggtggttttaggaagtcaactttagttttgctttgtttgcatgtccactggtttttttattttgatatttgtctttttttaaattttacagtagtcattgaaagttatgtttctttgcttacttcattttttccctctaattatttaagattggaacaaaagtataaatattatttatttgaggtagaatttttttcatgtagtttcttaatatatacttgaaggaaatgtttcaccttatttttggtctttgtttattcatttagaccctgcaagttgattctcattgccagattccattaccctttcttcctcataggtagtaattaccaatgtaactaagcatttgtgttctgatatctgaggccagtaactattaatatctagttctcagagcatttggaaaggttatcttaaatggctacctaaattgaaatccttttcagaaaaaatataattgcaagtaggtaggagtggcctaaattgtctaatgtaataaagtcagacaaaatgcacactttatagtttcaagattttcagtaaataaaatctgtccattcctacctggacatgtcccattaaaaagtggaagattttaaataatttctttacagatgttttatttaaacaggtagcacaatctactaatgttgtgtgatttgtgttatactggttgtaattaatttttttaattcatgaactagcggaaaatttattaaattaactattaactacattcaccttgtaaattactgtataaaacttgttgacaatgcactgactttagaaagatgttaatgtacataaatagagtgtaaataaaatagtgttgatgtactgaaatatgaactgtatcaaaagtattggtaattgtatatggggtgtacctgtttatctgttaactattatccaaacaaattaaatactgtggttgcctctatgtgctgtttttcctcatacaagtaaacacagaaagtcaaaaaaaaaaaaaaaaaaaaaa

SEQ ID NO: 273 - DNA, 582 bp, HUMAN
ttcccaccaggataatccccttttcaagagcgccaccacgacggtcatgaaccccaagtttgctgagagttaggagcacttggtgaagacaaggccgtcaggacccaccatgtctgccccatcacgcggccgagacatggcttgccacagctcttgaggatgtcaccaattaaccagaaatccagttattttccgccctcaaaatgacagccatggccggccgggtgcttctgggggctcgtcggggggacagctccactctgactggcacagtctttgcatggagacttgaggagggagggcttgaggttggtgaggttaggtgcgtgtttcctgtgcaagtcaggacatcagtctgattaaaggtggtgccaatttatttacatttaaacttgtcagggtataaaatgacatcccattaattatattgttaatcaatcacgtgtatagaaaaaaaataaaacttcaatacaggctgtccatggaaactgggcactgtgtccgctgtattcccccgactggcaaggtggccaggcacacgtgggccctgtcctgcccgctgacctttgccacacaggcaca

SEQ ID NO: 274 - DNA, 109 bp, HUMAN
cgtccctcagtcctctctcaggagtgcacgaagttcaaggtcagcagctgccgggaatgcatcgagtcggggcccggctgcacctggtgccagaagctggtaagtgcct

SEQ ID NO: 275 - DNA, 201 bp, HUMAN
ccctccccagaacttcacagggccgggggatcctgactccattcgctgcgacacccggccacagctgctcatgaggggctgtgcggctgacgacatcatggaccccacaagcctcgctgaaacccaggaagaccacaatgggggccagaagcagctgtccccacaaaaagtgacgctttacctgcgaccaggtaggcttgg

SEQ ID NO: 276 - DNA, 240 bp, HUMAN
cgtcttccagggagggggctctgcttctgcgggaagtgccgctgccacccgggctttgagggctcagcgtgccagtgcgagaggaccactgagggctgcctgaacccgcggcgtgttgagtgtagtggtcgtggccggtgccgctgcaacgtatgcgagtgccattcaggctaccagctgcctctgtgccaggagtgccccggctgcccctcaccctgtggcaagtacatgtgagtgcag

SEQ ID NO: 277 - DNA, 2016 bp, HUMAN
ctaccattttccctctcgattctatatgtacactcgggacaagttctcctgatcgaaaacggcaaaactaaggccccaagtaggaatgccttagttttcggggttaacaatgattaacactgagcctcacacccacgcgatgccctcagctcctcgctcagcgctctcaccaacagccgtagcccgcagccccgctggacaccggttctccatccccgcagcgtagcccggaacatggtagctgccatctttacctgctacgccagccttctgtgcgcgcaactgtctggtcccgccccgtcctgcgcgagctgctgcccaggcaggttcgccggtgcgagcgtaaaggggcggagctaggactgccttgggcggtacaaatagcagggaaccgcgcggtcgctcagcagtgacgtgacacgcagcccacggtctgtactgacgcgccctcgcttcttcctctttctcgactccatcttcgcggtagctgggaccgccgttcaggtaagaatggggccttggctggatccgaagggcttgtagcaggttggctgcggggtcagaaggcgcggggggaaccgaagaacggggcctgctccgtggccctgctccagtccctatccgaactccttgggaggcactggccttccgcacgtgagccgccgcgaccaccatcccgtcgcgatcgtttctggaccgctttccactcccaaatctcctttatcccagagcatttcttggcttctcttacaagccgtcttttctttactcagtcgccaatatgcagctctttgtccgcgcccaggagctacacaccttcgaggtgaccggccaggaaacggtcgcccagatcaaggtaaggctgcttggtgcgccctgggttccattttcttgtgctcttcactctcgcggcccgagggaacgcttacgagccttatctttccctgtaggctcatgtagcctcactggagggcattgccccggaagatcaagtcgtgctcctggcaggcgcgcccctggaggatgaggccactctgggccagtgcggggtggaggccctgactaccctggaagtagcaggccgcatgcttggaggtgagtgagagaggaatgttctttgaagtaccggtaagcgtctagtgagtgtggggtgcatagtcctgacagctgagtgtcacacctatggtaatagagtacttctcactgtcttcagttcagagtgattcttcctgtttacatccctcatgttgaacacagacgtccatgggagactgagccagagtgtagttgtatttcagtcacatcacgagatcctagtctggttatcagcttccacactaaaaattaggtcagaccaggccccaaagtgctctataaattagaagctggaagatcctgaaatgaaacttaagatttcaaggtcaaatatctgcaactttgttctcattacctattgggcgcagcttctctttaaaggcttgaattgagaaaagaggggttctgctgggtggcaccttcttgctcttacctgctggtgccttcctttcccactacaggtaaagtccatggttccctggcccgtgctggaaaagtgagaggtcagactcctaaggtgagtgagagtattagtggtcatggtgttaggactttttttcctttcacagctaaaccaagtccctgggctcttactcggtttgccttctccctccctggagatgagcctgagggaagggatgctaggtgtggaagacaggaaccagggcctgattaaccttcccttctccaggtggccaaacaggagaagaagaagaagaagacaggtcgggctaagcggcggatgcagtacaaccggcgctttgtcaacgttgtgcccacctttggcaagaagaagggccccaatgccaactcttaagtcttttgtaattctggctttctctaataaaaaagccacttagttcagtcatcgcattgtttcatctttacttgcaaggcctcagggagaggtgtgcttctcgg

SEQ ID NO: 278 - DNA, 1817 bp, HUMAN
gccacggcgcggacgccatgcacacggaccctgactactcggctgcctatgtcgtcatagaaactgatgcagaagatggaatcaaggggtgtggaattaccttcactctgggaaaaggcactgaagttgattggtccagaaaagggcgtggtgcacctggcgacagcggccgtcctaaacgcggtgtgggacttgtgggccaagcaggagggaaagcctgtctggaagttacttgtggacatggatcccaggatgctggtatcctgcatagatttcaggtacatcactgatgtcctgactgaggaggatgccctagaaatactgcagaaaggtcaaattggtaaaaaagaaagagagaagcaaatgctggcacaaggataccctgcttacacgacatcgtgcgcctggctggggtactcagatgacacgttgaagcagctctgtgcccaggcgctgaaggatggctggaccaggtttaaagtaaaggtgggtgctgatctccaggatgacatgcgaagatgccaaatcatccgagacatgattggaccggaaaagactttgatgatggatgccaaccagcgctgggatgtgcctgaggcggtggagtggatgtccaagctggccaagttcaagccattgtggattgaggagccaacctcccctgatgacattctggggcacgccaccatttccaaggcactggtcccattaggaattggcattgccacaggagaacagtgccacaatagagtgatatttaagcaactcctacaggcgaaggccctgcagttcctccagattgacagttgcagactgggcagtgtcaatgagaacctctcagtattgctgatggccaaaaagtttgaaattcctgtttgcccccatgctggtggagttggcctctgtgaactggtgcagcacctgattatatttgactacatatcagtttctgcaagccttgaaaatagggtgtgtgagtatgttgaccacctgcatgagcatttcaagtatcccgtgatgatccagcgggcttcctacatgcctcccaaggatcccggctactcaacagaaatgaaggaggaatctgtaaagaaacaccagtatccagatggtgaagtttggaagaaactccttcctgctcaagaaaattaagtgctcagccccaacaacttttttctttctgaagtgaaagggcttaaaatttcttggaaatagttttacaaaaatggatttaaaaaatcctaccgatcaagatgagttcagctagaagtcataccaccctcaggaatcagctaaagcaaaaagaacttttacctcggcatccagcccaacccctaaagactgacaatatccttcaagctcctttgaaagcaccctaaacagccatttccattttaatagttggatgcggattgtacccttcaatctgaaagtcttcagctttgaagtcatcaattttctcaacttttcgaagaatcctgagctttgggaaaggtctgggttctcgctgaagctaaaaacaaaataaggccattattttgccataattgtacgacctgttgtaattgctcctcatgtccatgaaacaagtacacaggatgtgatcaacaaagttctattttacaggagtatgatcctgtcgataccttgccgtagttatgtaacatgattggagcgcaaccagctgttctcttgaccacagatcgagagtgaggggtattttgtgacattacacagcatcaggagcctggtgcctcatcaggtgtaagttcttataaccactcttggcaaatttattaaagacaggaacacagtca

SEQ ID NO: 279 - DNA, 3320 bp, HUMAN
  misc_feature (1)..(3320): N=any base
gctgcaggcggccctggccaggcttgacgatgaaatcgctcagaagaacaatgccctgaagaagatccgggagctggagggccacatctcagacctccaggaggacctggactcagagcgggccgccaggaacaaggctgaaaagcagaagcgagacctcggcgaggagctggaggccctaaagacagagctggaagacacactggacagcacagccactcagcaggagctcagggccaagagggagcaggaggtgacggtgctgaagaaggccctggatgaagagacgcggtcccatgaggctcaggtccaggagatgaggcagaaacacgcacaggcggtggaggagctcacagagcagcttgagcagttcaagagggccaaggcgaacctagacaagaataagcagacgctggagaaagagaacgcagacctggccggggagctgcgggtcctgggccaggccaagcaggaggtggaacataagaagaagaagctggaggcgcaggtgcaggagctgcagtccaagtgcagcgatggggagcgggcccgggcggagctcaatgacaaagtccacaagctgcagaatgaagttgagagcgtcacagggatgcttaacgaggccgaggggaaggccattaagctggccaaggacgtggcgtccctcagttcccagctccaggacacccaggagctgcttcaagaagaaacccggcagaagctcaacgtgtctacgaagctgcgccagctggaggaggagcggaacagcctgcaagaccagctggacgaggagatggaggccaagcagaacctggagcgccacatctccactctcaacatccagctctccgactcgaagaagaagctgcaggactttgccagcaccgtggaagctctggaagaggggaagaagaggttccagaaggagatcgagaacctcacccagcagtacgaggagaaggcggccgcgtatgataaactggaaaagaccaagaacaggcttcagcaggagctggacgacctggttgttgatttggacaaccagcggcaactcgtgtccaacctggaaaagaagcagaggaaatttgatcagttgttagccgaggagaaaaacatctcttccaaatacgcggatgagagggacagagctgaggcagaagccagggagaaggaaaccaaggccctgtccctggctcgggcccttgaagaggccttggaagccaaagaggaactcgagcggaccaacaaaatgctcaaagccgaaatggaagacctggtcagctccaaggatgacgtgggcaagaacgtccatgagctggagaagtccaagcgggccctggagacccagatggaggagatgaagacgcagctggaagagctggaggacgagctgcaagccacggaggacgccaaactgcggctggaagtcaacatgcaggcgctcaagggccagttcgaaagggatctccaagcccgggacgagcagaatgaggagaagaggaggcaactgcagagacagcttcacgagtatgagacggaactggaagacgagcgaaagcaacgtgccctggcagctgcagcaaagaagaagctggaaggggacctgaaagacctggagcttcaggccgactctgccatcaaggggagggaggaagccatcaagcagctacgcaaactgcaggctcagatgaaggactttcaaagagagctggaagatgcccgtgcctccagagatgagatctttgccacagccaaagagaatgagaagaaagccaagagcttggaagcagacctcatgcagctacaagaggacctcgccgccgctgagagggctcgcaaacaagcggacctcgagaaggaggaactggcagaggagctggccagtagcctgtcgggaaggaacgcactccaggacgagaagcgccgcctggaggcccggatcgcccagctggaggaggagctggaggaggagcagggcaacatggaggccatgagcgaccgggtccgcaaagccacacagcaggccgagcagctcagcaacgagctggccacagagcgcagcacggcccagaagaatgagagttcccggcagcagcttgagcggcagaacaaggagctccggagcaagctccacgagatggagggggccgtcaagtccaagttcaaatccaccatcgcggcgctggaggccaagattgcacagctagaggagcaggtcgagcaggaggccagagagaaacaggcggccaccaagtcgctgaagcagaaagacaagaagctgaaggaaatcttgctgcaggtggaggacgagcgcaagatggccgagcagtacaaggagcaggcagagaaaggcaatgccagggtcaagcagctcaagaggcagctggaggaggcagaggaggagtcccagcgcatcaacgccaaccgcaggaagctgcagcgggagctggatgaggccacggagagcaacgaggccatgggccgcgaggtgaacgcactcaagagcaagctcaggcgaggaaacgagacctctttcgttccttctagaaggtctggaggacgtagagttattgaaaatgcagatggttctgaggaggaaacggacactcgagacgcagacttcaatggaaccaaggccagtgaataagcaactttctacagttttgcaccacggcaagaaaaccaaaaaccaaaacaaacaaacaaaaaaaaacccaacaacaacccagaacaaagcaaaacccagcagactgtacttagcattgtctaaatccattctcaaattccaaatatcacagacncctcacacaaggaatataaaaaccaccaccctccagcctgggcaacgtagtaaaacctcatctatacaagaatttaaaaataagctgggcgtggtggtacacacctgtggtcccagctactagggaggctgagccaggaagaacgctccagcccaggacttcgaggctgcaatgagctataattgcatcattgcactccagcctgggcaacagagaccctgtctcaaccaccaccaccaccaccacccctactacccctgtattcaaggtaaaaattgaagtttgtatgatgtaagagatgagaaaaacccaacaggaaacacagacacatcctccagttctatcaatggattgtgcagacactgagtttttagaaaaacatatccacggtaaccggtccctggcaattctttttacatgaaatggggagaaagtcaccgaaatgggtgccgccggcccccactcccaattcattccctaacctgcaaacctttccaacttctcacgtcaggcctttga

SEQ ID NO: 280 - DNA, 1817 bp, HUMAN
ctgtcagaatggccaccatggtaccatccgtgttgtggcccagggcctgctggactctgctggtctgctgtctgctgaccccaggtgtccaggggcaggagttccttttgcgggtggagccccagaaccctgtgctctctgctggagggtccctgtttgtgaactgcagtactgattgtcccagctctgagaaaatcgccttggagacgtccctatcaaaggagctggtggccagtggcatgggctgggcagccttcaatctcagcaacgtgactggcaacagtcggatcctctgctcagtgtactgcaatggctcccagataacaggctcctctaacatcaccgtgtacgggctcccggagcgtgtggagctggcacccctgcctccttggcagccggtgggccagaacttcaccctgcgctgccaagtggagggtgggtcgccccggaccagcctcacggtggtgctgcttcgctgggaggaggagctgagccggcagcccgcagtggaggagccagcggaggtcactgccactgtgctggccagcagagacgaccacggagcccctttctcatgccgcacagaactggacatgcagccccaggggctgggactgttcgtgaacacctcagccccccgccagctccgaacctttgtcctgcccgtgacccccccgcgcctcgtggccccccggttcttggaggtggaaacgtcgtggccggtggactgcaccctagacgggctttttccagcctcagaggcccaggtctacctggcgctgggggaccagatgctgaatgcgacagtcatgaaccacggggacacgctaacggccacagccacagccacggcgcgcgcggatcaggagggtgcccgggagatcgtctgcaacgtgaccctagggggcgagagacgggaggcccgggagaacttgacggtctttagcttcctaggacccattgtgaacctcagcgagcccaccgcccatgaggggtccacagtgaccgtgagttgcatggctggggctcgagtccaggtcacgctggacggagttccggccgcggccccggggcagccagctcaacttcagctaaatgctaccgagagtgacgacggacgcagcttcttctgcagtgccactctcgaggtggacggcgagttcttgcacaggaacagtagcgtccagctgcgagtcctgtatggtcccaaaattgaccgagccacatgcccccagcacttgaaatggaaagataaaacgagacacgtcctgcagtgccaagccaggggcaacccgtaccccgagctgcggtgtttgaaggaaggctccagccgggaggtgccggtggggatcccgttcttcgtcaacgtaacacataatggtacttatcagtgccaagcgtccagctcacgaggcaaatacaccctggtcgtggtgatggacattgaggctgggagctcccactttgtccccgtcttcgtggcggtgttactgaccctgggcgtggtgactatcgtactggccttaatgtacgtcttcagggagcaccaacggagcggcagttaccatgttagggaggagagcacctatctgcccctcacgtctatgcagccgacagaagcaatgggggaagaaccgtccagagctgagtgacgctgggatccgggatcaaagttggcgggggcttggctgtgccctcagattccgcaccaataaagccttcaaactccctaaaaaaaaaaaaaaaaaaaaaaaaaaaaaaaaaaaaaaaaaaaaaaaaaaaaaaaaaaaaaaaaaaaaaaaaaaaaaaaaaaaaaa

SEQ ID NO: 281 - DNA, 2099 bp, HUMAN
gcgtgcaacccgacgatagagagctcggaggtgatccacaaatccaagcacccagagatccattgggatccttggcagatggacatcagtgtcatttactaaccagcaggatggagacgacgcccttgaattctcagaagcagctatcagcgtgtgaagatggagaagattgtcaggaaaacggagttctacagaaggttgttcccaccccaggggacaaagtggagtccgggcaaatatccaatgggtactcagcagttccaagtcctggtgcgggagatgacacacggcactctatcccagcgaccaccaccaccctagtggctgagcttcatcaaggggaacgggagacctggggcaagaaggtggatttccttctctcagtgattggctatgctgtggacctgggcaatgtctggcgcttcccctacatatgttaccagaatggagggggggcattcctcctcccctacaccatcatggccatttttgggggaatcccgctcttttacatggagctcgcactgggacagtaccaccgaaatggatgcatttcaatatggaggaaaatctgcccgattttcaaagggattggttatgccatctgcatcattgccttttacattgcttcctactacaacaccatcatggcctgggcgctatactacctcatctcctccttcacggaccagctgccctggaccagctgcaagaactcctggaacactggcaactgcaccaattacttctccgaggacaacatcacctggaccctccattccacgtcccctgctgaagaattttacacgcgccacgtcctgcagatccaccggtctaaggggctccaggacctggggggcatcagctggcagctggccctctgcatcatgctgatcttcactgttatctacttcagcatctggaaaggcgtcaagacctctggcaaggtggtgtgggtgacagccaccttcccttatatcatcctttctgtcctgctggtgaggggtgccaccctccctggagcctggaggggtgttctcttctacttgaaacccaattggcagaaactcctggagacaggggtgtggatagatgcagccgctcagatcttcttctctcttggtccgggctttggggtcctgctggcttttgctagctacaacaagttcaacaacaactgctaccaagatgccctggtgaccagcgtggtgaactgcatgacgagcttcgtttcgggatttgtcatcttcacagtgctcggttacatggctgagatgaggaatgaagatgtgtctgaggtggccaaagacgcaggtcccagcctcctcttcatcacgtatgcagaagcgatagccaacatgccagcgtccactttctttgccatcatcttctttctgatgttaatcacgctgggcttggacagcacgtttgcaggcttggagggggtgatcacggctgtgctggatgagttcccacacgtctgggccaagcgccgggagcggttcgtgctcgccgtggtcatcacctgcttctttggatccctggtcaccctgacttttggaggggcctacgtggtgaagctgctggaggagtatgccacggggcccgcagtgctcactgtcgcgctgatcgaagcagtcgctgtgtcttggttctatggcatcactcagttctgcagggacgtgaaggaaatgctcggcttcagcccggggtggttctggaggatctgctgggtggccatcagccctctgtttctcctgttcatcatttgcagttttctgatgagcccgccacaactacgacttttccaatataattatccttactggagtatcatcttgggttactgcataggaacctcatctttcatttgcatccccacatatatagcttatcggttgatcatcactccagggacatttaaagagcgtattattaaaagtattaccccggagacaccaacagaaattccttgtggggacatccgcttgaatgctgtgtaacacactcaccgagaggaaaaaggcttctccacaacctcctcctccagttctgaggaggcacgcctgccttctcccctccgagtgaatgagtttgcc

SEQ ID NO: 282 - DNA, 348 bp, HUMAN
ggcctggagtgcgacggcaaggtcaacatctgctgtaagaaacagttctttgtcagtttcaaggacatcggctggaatgactggatcattgctccctctggctatcatgccaactactgcgagggtgagtgcccgagccatatagcaggcacgtccgggtcctcactgtccttccactcaacagtcatcaaccactacgcatgcggccatagcccctttgccaacctcaaatcgtgctgtgtgcccaccaagctgagacccatgtccatgttgtactatgatgatggtcaaaacatcatcaaaaaggacattcagaacatgatcgtggaggagtgcgggtgctcctaa

SEQ ID NO: 283 - DNA, 2137 bp, HUMAN
ctcgagagttgccggggaggagcggagcggtgcggaggctctgctcggatcgaggtctgcagcgcagcttcgggagcatgagtgctgcagtgactgcagggaagctggcacgggcaccggccgaccctgggaaagccggggtccccggagttgcagctcccggagctccggcggcggctccaccggcgaaagagatcccggaggtcctagtggacccacgcagccggcggcgctatgtgcggggccgctttttgggcaagggcggctttgccaagtgcttcgagatctcggacgcggacaccaaggaggtgttcgcgggcaagattgtgcctaagtctctgctgctcaagccgcaccagagggagaagatgtccatggaaatatccattcaccgcagcctcgcccaccagcacgtcgtaggattccacggctttttcgaggacaacgacttcgtgttcgtggtgttggagctctgccgccggaggtctctcctggagctgcacaagaggaggaaagccctgactgagcctgaggcccgatactacctacggcaaattgtgcttggctgccagtacctgcaccgaaaccgagttattcatcgagacctcaagctgggcaaccttttcctgaatgaagatctggaggtgaaaataggggattttggactggcaaccaaagtcgaatatgacggggagaggaagaagaccctgtgtgggactcctaattacatagctcccgaggtgctgagcaagaaagggcacagtttcgaggtggatgtgtggtccattgggtgtatcatgtataccttgttagtgggcaaaccaccttttgagacttcttgcctaaaagagacctacctccggatcaagaagaatgaatacagtattcccaagcacatcaaccccgtggccgcctccctcatccagaagatgcttcagacagatcccactgcccgcccaaccattaacgagctgcttaatgacgagttctttacttctggctatatccctgcccgtctccccatcacctgcctgaccattccaccaaggttttcgattgctcccagcagcctggaccccagcaaccggaagcccctcacagtcctcaataaaggcttggagaaccccctgcctgagcgtccccgggaaaaagaagaaccagtggttcgagagacaggtgaggtggtcgactgccacctcagtgacatgctgcagcagctgcacagtgtcaatgcctccaagccctcggagcgtgggctggtcaggcaagaggaggctgaggatcctgcctgcatccccatcttctgggtcagcaagtgggtggactattcggacaagtacggccttgggtatcagctctgtgataacagcgtgggggtgctcttcaatgactcaacacgcctcatcctctacaatgatggtgacagcctgcagtacatagagcgtgacggcactgagtcctacctcaccgtgagttcccatcccaactccttgatgaagaagatcaccctccttaaatatttccgcaattacatgagcgagcacttgctgaaggcaggtgccaacatcacgccgcgcgaaggtgatgagctcgcccggctgccctacctacggacctggttccgcacccgcagcgccatcatcctgcacctcagcaacggcagcgtgcagatcaacttcttccaggatcacaccaagctcatcttgtgcccactgatggcagccgtgacctacatcgacgagaagcgggacttccgcacataccgcctgagtctcctggaggagtacggctgctgcaaggagctggccagccggctccgctacgcccgcactatggtggacaagctgctgagctcacgctcggccagcaaccgtctcaaggcctcctaatagctgccctcccctccggactggtgccctcctcactcccacctgcatctggggcccatactggttggctcccgcggtgccatgtctgcagtgtgccccccagccccggtggctgggcagagctgcatcatccttgcaggtgggggttgctgtataagttatttttgtacatgttcgggtgtgggttctacagccttgtccccctccccctcaaccccaccatatgaattgtacagaatatttctatt

SEQ ID NO: 284 - DNA, 817 bp, HUMAN
agtcctgcgtccgggccccgaggcgcagcagggcaccaggtggagcaccagctacgcgtggcgcagcgcagcgtccctagcaccgagcctcccgcagccgccgagatgctgcgaacagagagctgccgccccaggtcgcccgccggacaggtggccgcggcgtccccgctcctgctgctgctgctgctgctcgcctggtgcgcgggcgcctgccgaggtgctccaatattacctcaaggattacagcctgaacaacagctacagttgtggaatgagatagatgatacttgttcgtcttttctgtccattgattctcagcctcaggcatccaacgcactggaggagctttgctttatgattatgggaatgctaccaaagcctcaggaacaagatgaaaaagataatactaaaaggttcttatttcattattcgaagacacagaagttgggcaagtcaaatgttgtgtcgtcagttgtgcatccgttgctgcagctcgttcctcacctgcatgagagaagaatgaagagattcagagtggacgaagaattccaaagtccctttgcaagtcaaagtcgaggatattttttattcaggccacggaatggaagaaggtcagcagggttcatttaaaatggatgccagctaattttccacagagcaatgctatggaatacaaaatgtactgacattttgttttcttctgaaaaaaatccttgctaaatgtactctgttgaaaatccctgtgttgtcaatgttctcagttgtaacaatgttgtaaatgttcaatttgttgaaaattaaaaaatctaaaaataaa

SEQ ID NO: 285 - DNA, 2643 bp, HUMAN
gcctccagctgacctctggctcctgtcctctggctccacctgcaccgccctgctcttcctaaggggccaggaagcccccagaagctctaccatcgacgtgggtggtggcacccggctcaccctgagagcagagggcgtgcagggggctcagttctgagcccagccggcccaccatggcacggcggttccaggaggagctggccgccttcctcttcgagtatgacaccccccgcatggtgctggtgcgtaataagaaggtgggcgttatcttccgactgatccagctggtggtcctggtctacgtcatcgggtgggtgtttctctatgagaagggctaccagacctcgagcggcctcatcagcagtgtctctgtgaaactcaagggcctggccgtgacccagctccctggcctcggcccccaggtctgggatgtggctgactacgtcttcccagcccagggggacaactccttcgtggtcatgaccaatttcatcgtgaccccgaagcagactcaaggctactgcgcagagcacccagaagggggcatatgcaaggaagacagtggctgtacccctgggaaggccaagaggaaggcccaaggcatccgcacgggcaagtgtgtggccttcaacgacactgtgaagacgtgtgagatctttggctggtgccccgtggaggtggatgacgacatcccgcgccctgcccttctccgagaggccgagaacttcactcttttcatcaagaacagcatcagctttccacgcttcaaggtcaacaggcgcaacctggtggaggaggtgaatgctgcccacatgaagacctgcctctttcacaagaccctgcaccccctgtgcccagtcttccagcttggctacgtggtgcaagagtcaggccagaacttcagcaccctggctgagaagggtggagtggttggcatcaccatcgactggcactgtgacctggactggcacgtacggcactgcagacccatctatgagttccatgggctgtacgaagagaaaaatctctccccaggcttcaacttcaggtttgccaggcactttgtggagaacgggaccaactaccgtcacctcttcaaggtgtttgggattcgctttgacatcctggtggacggcaaggccgggaagtttgacatcatccctacaatgaccaccatcggctctggaattggcatctttggggtggccacagttctctgtgacctgctgctgcttcacatcctgcctaagaggcactactacaagcagaagaagttcaaatacgctgaggacatggggccaggggcggctgagcgtgacctcgcagctaccagctccaccctgggcctgcaggagaacatgaggacatcctgatgctcgggccccaactcctgactgggtgcagcgtgaggcttcagcctggagccctggtgggtcccagccagggcagaggggcctccccaggaagtctcctaccctctcagccaggcagagagcagtttgccagaagctcagggtgcatagtaggagagacctgtgcaaatctgagctccggctccgaccccacacaccctgagggaggcctaccctagcctcagccgctcctggtgggggaatggctgggggttgggcaggaccctcccacacacctgcaccctagcttcgtgcttctctctccggactctcattatccaacccgctgcctccatttctctagatctgtgctctccgatgtggcagtcagtaaccataggtgactaaattaaactaaaataaaatagaatgaaacacaaaattcaattcctcggctgaactagccacatttcaactgctcagtagatacgtgtggttagtggctgccatactggacagctcggggcattttcactgtcaaagaaagttctattagacagccctgcttgagccctgtttcttcctggcttcggtttccctggggaacttatcgacaatgcaagctcctgggcccacccccagacctcctgaaccaaaagctccagggctggccgtatgatctgtgtggatggcaaactccccaggccattctgggacctaagtttaagaagtgccgtcctcgaactttctgactctaagctcctgagcgggagtcagacttagccctgagcctgcacttcctgttcaggtgcagacactgaacagggtctcaaacaccttcagcatgtgtgttgtgtgctcacgtgccacacagtgtctcatgcacacaacccagtgtacacaccacctacgtgcacacagcatccttccacactgtgtatgtgaacagcttgggccctgcaaacacaaccatctacacacatctacacccccaagcacacacacatggtccgtgccatgtcacctccatagggaaaggcttctctccaagtgtgccaggccaggacagccctcccagccatgaatccttactcagctacctcgggttggggtgggagccccagccaaatcctgggctccctgcctgtggctcagccccagctcccaaggcctgcctggctctgtctgaacagaaggtctgggggaagcgaggggtggagtacaataaagggaatgaggacaaacaaaaaaaaaaaaaaaaaaaaaaaaaaaaaaaaaaaaaaaaaaaaaa

SEQ ID NO: 286 - DNA, 1587 bp, HUMAN
tggcactaggggcagccactcagcccttcgagctgtaggggaggcgctgcgcccccggccccagccgatcgggggctcctggcgctactgccctccagagtccctcctgccgtctgacttgagtccctgctgctgcagtgcacgcccccctttcggcagccagggtggggcccagacccaacctggcccctcctgcccccaccccgcctttgggtcgctgacccccaggctgtggtgagggtctgagagctggtaccacggagcctgggcaacctcctccgcccacccatgcccaccccgcatgaggctgagaagcagatcacagggccagaggaggcggaccggcccccttcaatgtccagtcatgatacagcctctccagcggcccccagccgcaacccctgctgcctgtgctggtgctgctgctgtagctgctcctggaaccaagagcggcggcgcgcgtggcaggcctcccgggagagcaagctgcagcccctccccagctgtgaagtatgtgccacgccaagtcctgaggaggtgcagagctgggcgcagtcttttgacaagctgatgcacagcccagcgggacgcagcgtgttccgggcgttcctgcggacagagtacagcgaggagaacatgctcttctggttggcctgcgaggagctgaaggccgaggccaaccagcatgtggtagacgagaaggcgaggctcatctacgaggactacgtatccatcctgtcccccaaggaggtgagcctggactcccgtgtgcgggagggcatcaacaagaagatgcaggagccgtccgcacacacgttcgacgacgcgcagctgcagatctacacgctcatgcaccgggactcctacccccgcttcctcagctctcccacctaccgtgccctgctgctgcaggggccatcacagtcctcctccgaggcctaggccgcccccagcagcacagaccccgccgcctcctacggccgactctgggttcccttcaggtgttggtgtcggcagggctgtcagggcacatgcctggccggctggggtccccacccgcggagacggtcctagacccagtggggagtgctgtgtctcctgggtctgcccacccgtggccaagcaggaactccaggtgcagggcgggcctccaggtgcagggcgggccagaagccccctcatcggcccgcagctggctggcccagtgctcctggctgggggctcttgcgtggtgagagtaggggtccccccaggagccatgctggacccatgagcctcgctggggcctcctccccaggcagccaatgggccccagacaagcctttggtggggaacagaacctccgcatcgtgtagttttgtgacataaggagacctcctacttgagctgtctgtaccccagaatcaaacacagaactcagaaccagatttaggccctcagaatcctgcactcaaggtggcaggacccaatttctgttttatatgttcatgaactttaaacctggaaacatgtccttactaggtgttttatcaaaaaaaagttttttattattgaagatatttttaaagcaaaaaaaaaaaaaaaaaa

SEQ ID NO: 287 - DNA, 1163 bp, HUMAN
gcgcggagcgggctccggagggaagtcccgagacaaagggaagcgccgccgccgccgccccgctcggtcctccacctgtccgctacgctcgccggggctgcggccgcccgagggactttgaacatgtcggggatcgccctcagcagactcgcccaggagaggaaagcatggaggaaagaccacccatttggtttcgtggctgtcccaacaaaaaatcccgatggcacgatgaacctcatgaactgggagtgcgccattccaggaaagaaagggactccgtgggaaggaggcttgtttaaactacggatgcttttcaaagatgattatccatcttcgccaccaaaatgtaaattcgaaccaccattatttcacccgaatgtgtacccttcggggacagtgtgcctgtccatcttagaggaggacaaggactggaggccagccatcacaatcaaacagatcctattaggaatacaggaacttctaaatgaaccaaatatccaagacccagctcaagcagaggcctacacgatttactgccaaaacagagtggagtacgagaaaagggtccgagcacaagccaagaagtttgcgccctcataagcagcgaccttgtggcatcgtcagaaggaagggattggtttggcaagaacttgtttacaacatttttgcaaatctaaagttgctccatacaatgactagtcacctgggggggttgggcgggcgccatcttccattgccgccgcgggtgtgcggtctcgattcgctgaattgcccgtttccatacagggtctcttccttcggtcttttgtatttttgattgttatgtaaaactcgcttttattttaatattgatgtcagtatttcaactgctgtaaaattataaacttttatacttgggtaagtcccccaggggcgagttcctcgctctgggatgcaggcatgcttctcaccgtgcagagctgcacttggcctcagctggctgtatggaaatgcaccctccctcctgccgctcctctctagaaccttctagaacctgggctgtgctgcttttgagcctcagaccccagggcagcatctcggttctgcgccacttcctttgtgtttatatggcgttttgtctgtgttgctgtttagagtaaataaactgtttatataaaaaaaaa

SEQ ID NO: 288 - DNA, 1075 bp, HUMAN
aagcattgagtttactgcaaggtcagaaaagcatgcaaagcccttagagtggctgcaaagagctccaacaaaacaatttagaactttattaaggaatagggggaagctaggaagaaactcaaaacatcaagattttaaatacgcttcttggtctccttgctataattatctgggataagcatgctgttttctgtctgtccctaacatgccctgtgattatccgcaaacaacacacccaagggcagaactttgttacttaaacaccatcctgtttgcttctttcctcaggaactgtggctgcaccatctgtcttcatcttcccgccatctgatgagcagttgaaatctggaactgcctctgttgtgtgcctgctgaataacttctatcccagagaggccaaagtacagtggaaggtggataacgccctccaatcgggtaactcccaggagagtgtcacagagcaggacagcaaggacagcacctacagcctcagcagcaccctgacgctgagcaaagcagactacgagaaacacaaagtctacgcctgcgaagtcacccatcagggcctgagctcgcccgtcacaaagagcttcaacaggggagagtgttagagggagaagtgcccccacctgctcctcagttccagcctgaccccctcccatcctttggcctctgaccctttttccacaggggacctacccctattgcggtcctccagctcatctttcacctcacccccctcctcctccttggctttaattatgctaatgttggaggagaatgaataaataaagtgaatctttgcacctgtggtttctctctttcctcatttaataattattatctgttgttttaccaactactcaatttctcttataagggactaaatatgtagtcatcctaaggcgcataaccatttataaaaatcatccttcattctattttaccctatcatcctctgcaagacagtcctccctcaaacccacaagccttctgtcctcacagtcccctgggccatggtaggagagacttgcttccttgttttcccctcctcagcaagccctcatagtccttt

SEQ ID NO: 289 - DNA, 8096 bp, HUMAN
cttttctcaagacaactacataagcagacaaaattgcaaagatctgccctgtgtcgagtatgacagccacgactcgtggctctccggtcggagggaatgacaaccagggccaggctcctgatggacagtctctgccccccctccaacagaatcagacttcatcgcctgattcttccaatgaaaattccccggcaactcccccagatgagcaaggtcaaggtgatgccccaccacagcttgaagatgaggaacctgcatttccacatactgacttggccaagttggatgacatgatcaacaggcctcgatgggtggttccagttttgccgaaaggggaattagaagtgcttttagaagctgctattgatcttagtaaaaagggccttgatgttaaaagtgaagcatgtcagcgatttttccgtgatgggctaacaatatcattcactaaaattcttacagatgaagcagtgagtggctggaagtttgaaattcataggtgtctggtggagctatgtgtggccaagttgtcccaagactggtttccacttttagaacttcttgccatggccttaaatcctcattgcaaattccatatctacaatggtacacgtccatgtgaatcagtttcctcaagtgttcagttgcctgaagatgaactctttgctcgttctccagatcctcgatcaccaaagggttggctagtggatcttctcaacaaatttggcactttaaatgggttccagattttgcatgatcgttttattaatggatcagcattaaacgttcaaataattgcagcccttattaaaccatttgggcaatgctatgagtttctcactcttcatacagtgaaaaagtactttcttccaataatagaaatggttccacagtttttagaaaacttaactgatgaagaactgaaaaaagaagcaaagaatgaagccaaaaatgatgctctttcaatgattattaaatctttgaagaatttagcttcaagggttccaggacaagaagaaactgttaaaaacttagaaatatttaggttaaaaatgatacttagattattgcaaatttcttctttcaatggaaagatgaatgcactgaatgaagttaataaggtgatatctagtgtatcatactatactcatcgacatggtaatcctgaggaggaagagtggctcacagctgaacgaatggcagaatggatacagcagaacaatatcttatccatagtgttgcgagatagtcttcatcagccacagtatgtagaaaagttagagaagattcttcgttttgtcatcaaagaaaaagctctgaccttacaggatcttgataatatctgggcagcacaggcagggaaacatgaagccattgtgaagaatgtacatgatctcctggcaaaattggcatgggatttttctcctgaacaacttgatcatccttttgattgttttaaggccagtcggacaaatgcgagtaaaaagcaacgtgaaaagctacttgagctgatacgtcgtcttgcagaagatgataaagatggtgtgatggcacacagagtgttgaaccttctgtggaatctggctcacagtgatgatgtgcctgtagatatcatggacctggctctcagtgcccacataaaaatactagattacagttgctcccaggaccgtgatacacaaaagatccaatggatagatcgctttatagaagaacttcgcacaaatgacaaatgggttattcccgcactgaaacaaattagagaaatttgtagtttgtttggtgaagcgcctcaaaatttgagtcaaactcagcgaagtccccatgtgttttatcgccatgacttaatcaatcaacttcaacacaatcatgccctagttactttggtagcagaaaaccttgtaacttacatggaaagcatgagactatatgctagagaccatgaagattatgacccacaaactgtgaggctgggaagtagatatagtcatgttcaagaagttcaagaacggcttaacttccttagatttttattgaaggatggtcagctgtggctatgtgctcctcaggcaaaacaaatatggaaatgcttagctgagaatgcagtttacctttgtgatcgtgaagcctgttttaagtggtattccaagttgatgggggatgaaccagacttagatcctgatattaataaggacttctttgaaagtaatgtgcttcagcttgatccttctctgttaactgaaaatggaatgaagtgttttgagcgattcttcaaagctgtgaattgtcgagaaggaaaactagtagcaaaaaggagagcctatatgatggatgacttggagttaataggattagattacctttggagggtcgtgattcagagtaatgatgatattgccagcagagctatagatctcctcaaagagatatacacgaaccttggtccaagactacaagtcaatcaggtggtgatccatgaagacttcattcagtcttgttttgatcgtctgaaggcttcctatgacacattgtgtgttttggatggtgacaaagacagtgttaattgtgcaagacaggaagctgttcgaatggttcgagtattaactgttttaagggaatatataaatgaatgtgacagtgattatcatgaggaaagaacaattctccctatgtcgagagcattccgcggtaaacacctctcttttgtagttcgatttccaaaccagggcagacaggttgatgacttggaggtatggtctcatacaaatgatacaattggttcagtacgacgatgtattctcaatcgtattaaagccaacgtagcccatacaaaaattgagctctttgtgggcggtgagctgatagatcctgcagatgatagaaagttgattggacaattaaacttaaaagataaatcgcttattacagccaaacttacacagataagttccaatatgccttcaagccctgatagctcttctgattcctccactggatctcctggaaaccatggtaatcattacagtgatggtcccaatccagaagtggaaagctgtttgcctggagtgataatgtcactgcatcccagatacatctcttttctttggcaagttgcagacttaggtagcagcctaaatatgccaccccttagagatggagcaagagtacttatgaaacttatgccgccagatagcacaacgatagaaaaattaagagctatttgtttagaccatgccaaacttggagaaagcagccttagtccatctcttgactcacttttctttggtccttcagcctcacaagtgctatatctaacagaggtagtctatgccttgttaatgcctgctggtgcacctctggctgatgattcctctgattttcagtttcacttcttgaaaagtggtggcctaccccttgtactgagtatgctaaccagaaataacttcctaccgaatgcagatatggaaactcgaaggggtgcctacctcaatgctcttaaaatagccaagcttttgctaactgccattggctatggtcatgttcgagctgtggcagaagcttgtcagccaggtgtagaaggtgtgaatcccatgacacagatcaaccaagttacccatgatcaagcagtggtgctacaaagtgcccttcagagcattcctaatccatcatccgagtgcatgcttagaaatgtgtcagttcgtcttgctcagcagatatctgatgaggcttcaagatatatgcctgatatttgtgtaattagagctatacaaaaaattatctgggcatcaggatgtgggtcgttacagctagtatttagcccaaatgaagaaatcactaaaatttatgagaagaccaatgcaggcaatgagccagacttggaagacgaacaggtttgctgtgaagcattggaagtgatgaccttatgttttgccttgattccaacagccttagatgctcttagtaaagaaaaggcttggcagacattcatcattgacttactattgcactgtcacagcaaaactgttcgtcaggtggcacaggagcagttctttttaatgtgcaccagatgttgcatgggacaccggcctctacttttcttcattactctactctttactgttttggggagcacagcaagagagagagctaaacactcaggcgactactttactcttttaagacaccttcttaattacgcttacaatagtaatattaatgtacccaatgctgaagttcttttcaataatgaaattgattggcttaaaagaattagggatgatgttaaaagaacaggagaaacgggtattgaagagacgatcttagagggccaccttggagtgacaaaggagttactggcctttcaaacttctgagaaaaaatttcatattggttgtgaaaaaggaggtgctaatctcattaaagaattaattgatgatttcatatttcctgcatccaatgtttacctacagtatatgagaaatggagagcttccagctgaacaggctattccggtctgtggttcaccacctacaattaatgctggttttgaattacttgtagcattagctgttggctgtgtgaggaatctcaaacaaatagtagattctttgactgaaatgtattacattggcacagcaataactacttgtgaagcacttactgagtgggaatatctgccacctgttggaccccgcccacccaaaggattcgtggggctgaaaaatgccggtgctacttgttacatgaattctgtgattcagcaactctacatgattccttccattaggaacggtattcttgccattgaaggcacaggtagtgatgtagatgatgatatgtctggggatgagaagcaggacaatgagagcaatgttgatcccagggatgatgtatttggatatcctcaacaatttgaagataaaccagcattaagtaaaactgaagatagaaaagagtacaacattggtgtcctaagacaccttcaggtcatctttggtcatttagctgcttctcgactgcaatactatgtgcccagaggattttggaaacagttcaggctttggggtgagcctgttaatctgcgtgaacaacacgatgctttagaattttttaattcattggtggatagtttagatgaagctttaaaagctttaggacatccagctatgctaagtaaagtcttaggaggttcctttgctgatcagaagatctgccaaggctgcccacataggtacgaatgtgaagaatcttttacgaccctaaacgtagacattagaaatcaccaaaatcttcttgattctttggaacagtatgtcaaaggagatttactagaaggtgcaaatgcatatcattgtgaaaaatgcaataaaaaggttgataccgtaaagcgcttgctgattaaaaaattacctcctgttcttgctatacaactaaagcgatttgactatgactgggaaagagaatgtgcaatcaagttcaatgattattttgaatttcctcgagagctggacatggaaccttacacagttgcaggtgtcgcaaagctggaaggggataatgtaaacccagagagtcagttgatacaacagagtgagcagtctgaaagtgagacagcaggaagcacaaaatacagacttgtgggtgtgctcgtacacagtggtcaagcgagtggggggcattattattcttacatcatccaaaggaatggtggagatggtgagagaaatcgctggtataaatttgatgatggtgatgtaacagaatgtaaaatggatgatgacgaagaaatgaaaaaccagtgttttggtggagagtacatgggagaagtgtttgatcacatgatgaagcgtatgtcatacaggcgccagaaaaggtggtggaatgcttatatacctttttatgaacgaatggacacaatagaccaagatgatgagttgataagatatatatcagagcttgctatcaccaccagacctcatcagattattatgccatcagccattgagagaagtgtacggaaacagaacgtacaattcatgcataaccgaatgcagtacagtatggagtattttcagtttatgaaaaaactgcttacatgtaatggcgtttacttaaaccctcctcccgggcaagatcacctgttgcctgaagcagaagaaatcactatgatcagtattcaacttgctgctaggttcctctttactacaggatttcacacaaagaaagtagtccgtggctctgccagtgattggtatgatgcattgtgtattctccttcgtcacagcaagaatgtacgtttttggtttgctcataacgtcctttttaatgtttcaaatcgcttctccgaataccttctggagtgccctagtgcagaagtgaggggtgcgtttgcaaaacttatagtctttattgcacatttttccttgcaagatgggccatgtccttcaccttttgcctctcctggaccttctagtcaggcttatgacaacttaagcttgagtgatcacttactaagagcagtactaaatctcttgagaagggaagtttcagagcatgggcgtcatttacagcagtatttcaacctgtttgtaatgtatgccaatttaggtgtggcagagaagacacagcttctgaaattgagtgtacctgctacttttatgcttgtgtctttagatgaaggtccaggtcctccaatcaaataccagtatgctgaattaggcaaattatactcagtagtgtcacagctgatccgctgttgcaatgtctcttcaagaatgcagtcttcaatcaatggtaatcctcctcttcccaatccttttggtgatcctaatttatcacaacctataatgccaattcagcagaatgtggcagacattttatttgtgagaacaagttatgtgaagaaaatcattgaagactgcagtaattcagaggaaaccgtcaaattgcttcgtttttgctgctgggagaatcctcagttctcatctactgtcctcagtgaacttctctggcaggttgcatattcctatccctatgaactgcggccctatttggatctgcttttgcaaatcttactgattgaggactcctggcaaactcacagaattcataatgcactgaaaggaattccagatgaccgagatgggctgtttgacacaatccagcgctctaagaatcactatcaaaaaagagcataccagtgtataaaatgtatggtagctctatttagtaactgtcctgttgcttaccaaatcctgcagggcaatggagatcttaaaagaaagtggacctgggcagtggaatggcttggagatgaacttgaaagaagaccatatactggcaatcctcagtacacttacaacaattggtctcccccagtgcaaagcaatgaaacgtccaatggttatttcttggagagatcacatagtgctaggatgacacttgcaaaagcttgtgaactctgtccagaggaggagccagatgaccaagatgctccagatgaacatgagtcgcctccacctgaagatgccccattgtacccccattcacctggatctcagtatcaacagaataaccatgtgcatggacagccatatacaggcccagcagcacatcacatgaacaaccctcagagaactggccaacgagcacaagaaaattatgaaggcagtgaagaagtatccccacctcaaaccaaggatcaatgaaatgcacataattaactggttccatcaagactgtgcacccaggccttacagtccaacctttttctgtgtctggctaatatttaaaactagaaaaactattcctaatcaacatggagtggagagtttattcactgtcttatctgcagaaatttgctgtcaatatataacccgcctgcagtggaaagtgtatagtgttttgtaataaatggcctgatgctaatgtgtaaatggcaaaggtgtatatagtatattaatgttgactgttaattcttaagcaagaaacttttttcttgatgagactcacagatctacacaaactacaaaagttaattttctgttacacccactgcactcttaaccagtgttgctgcctcatggcagtggatcagctcc

SEQ ID NO: 290 - DNA, 2454 bp, HUMAN
ccaggaggcacgctggttttccggggccgctccatcgcgccttcctcctgcgcctcgcttctccggtccagccgccatcttcctttccgcacaggggccgccgagcggggccatgcagccaacgctgcttctcagcctcctgggagccgtggggctggcggctgtcaattccatgccagtggataacaggaaccacaatgaaggaatggtgactcgctgcatcattgaggtcctctcaaatgccttgtcgaagtccagcgctccacccatcacccctgagtgccgccaagtcctgaagacgagtagaaaagacgtcaaagacaaagagacaactgaaaatgaaaacacaaagtttgaagtaagattgttaagagacccagctgatgcctcggaagcccacgagtcctccagcaggggagaggcaggagccccaggggaggaggacatccaaggcccaacaaaggcagacacagagaaatgggcagagggaggcgggcacagccgagagcgagcggatgagccccagtggagcctctatccctccgacagccaagtctctgaagaagtgaagacacgccattctgagaagagccagagagaggatgaggaggaggaggagggagagaactatcaaaaaggggagcgaggggaagatagcagtgaagagaaacaccttgaagagccaggagagacacaaaacgcttttctcaatgaaagaaagcaggcttcagctataaaaaaagaggagttagtggccagatcggaaacacatgctgccgggcattctcaggagaagacacatagccgagagaagagtagccaggagagtggagaggaggcagggagccaggagaatcacccccaggagtctaaaggccaaccccgaagccaggaagaatctgaggaaggtgaggaagatgccacctctgaggtggacaaacgacgcacgaggcccagacaccaccacgggaggagcaggcccgacaggtcctctcaaggagggagtcttccctctgaggaaaagggacacccccaggaggaatctgaggagtcaaacgtcagcatggccagtttaggggaaaagagggaccaccattcaacccactacagggcttcagaggaagaacctgaatatggagaagaaataaagggttatccaggcgtccaggcccctgaggacctggagtgggagcgctataggggcagaggaagtgaagaatacagggctccaagacctcagagtgaggagagttgggatgaggaggacaagagaaactaccccagcttagagcttgataagatggcacatggatatggtgaagaaagtgaggaagagaggggccttgagccgggaaagggacgccatcacagaggcaggggaggggagccacgtgcctatttcatgtctgacaccagagaagagaaaaggttcttgggtgaaggacaccaccgtgtccaagaaaaccagatggacaaggcaaggaggcatccacaaggtgcgtggaaagagctggacagaaattatctcaactacggtgaggaaggagccccagggaagtggcagcagcagggagacctgcaggacactaaagaaaacagggaggaagctaggtttcaagataaacaatatagctcccatcacacagctgaaaagaggaagagattaggggaactgttcaacccatactacgaccctctccagtggaagagcagccattttgaaagaagagacaacatgaatgacaattttctcgagggtgaggaggaaaatgagctgaccttgaacgagaagaatttcttcccagaatacaactatgactggtgggagaaaaagcccttctctgaggatgtgaactgggggtatgagaagagaaacctcgccagggtccccaagctggacctgaaaaggcaatatgacagggtggcccaactggaccagctccttcactacaggaagaagtcagctgagtttccagacttctatgattctgaggagccggtgagcacccaccaggaggcagaaaatgaaaaggacagggctgaccagacagtcctgacagaggacgagaaaaaagaactcgaaaacttggctgcaatggatttggaactacagaagatagctgagaaattcagccaaaggggctgactgtcattggagcggtgggcactgttaagaagcagccatcacatgatctgtttttcaccacttcactgaaagacaccatttatatacccaagggcagaaagtagaacttactattcattaaatgtttgacacaattggaattgtctttaatttctgtcagaatgctattgaaaatgtgaattgcatgacttgtagcatattcttttctgcaaaatagacatattaacatgcttatgacaatgactgtgctactgtctttggaaaaatgtttgtctcagttggaaataataaaagattcacctgagacc

SEQ ID NO: 291 - DNA, 3923 bp, HUMAN
cccggacgctcgcgggtctcggaacgcatcccgccgcgggggcttcggccgtggcatgggcgccgcgggcctgctcggggttttcttggctctcgtcgcaccgggggtcctcgggatttcttgtggctctcctccgcctatcctaaatggccggattagttattattctacccccattgctgttggtaccgtgataaggtacagttgttcaggtaccttccgcctcattggagaaaaaagtctattatgcataactaaagacaaagtggatggaacctgggataaacctgctcctaaatgtgaatatttcaataaatattcttcttgccctgagcccatagtaccaggaggatacaaaattagaggctctacaccctacagacatggtgattctgtgacatttgcctgtaaaaccaacttctccatgaacggaaacaagtctgtttggtgtcaagcaaataatatgtgggggccgacacgactaccaacctgtgtaagtgttttccctctcgagtgtccagcacttcctatgatccacaatggacatcacacaagtgagaatgttggctccattgctccaggattgtctgtgacttacagctgtgaatctggttacttgcttgttggagaaaagatcattaactgtttgtcttcgggaaaatggagtgctgtcccccccacatgtgaagaggcacgctgtaaatctctaggacgatttcccaatgggaaggtaaaggagcctccaattctccgggttggtgtaactgcaaactttttctgtgatgaagggtatcgactgcaaggcccaccttctagtcggtgtgtaattgctggacagggagttgcttggaccaaaatgccagtatgtgaagaaattttttgcccatcacctccccctattctcaatggaagacatataggcaactcactagcaaatgtctcatatggaagcatagtcacttacacttgtgacccggacccagaggaaggagtgaacttcatccttattggagagagcactctccgttgtacagttgatagtcagaagactgggacctggagtggccctgccccacgctgtgaactttctacttctgcggttcagtgtccacatccccagatcctaagaggccgaatggtatctgggcagaaagatcgatatacctataacgacactgtgatatttgcttgcatgtttggcttcaccttgaagggcagcaagcaaatccgatgcaatgcccaaggcacatgggagccatctgcaccagtctgtgaaaaggaatgccaggcccctcctaacatcctcaatgggcaaaaggaagatagacacatggtccgctttgaccctggaacatctataaaatatagctgtaaccctggctatgtgctggtgggagaagaatccatacagtgtacctctgaggtgtggacaccccctgtaccccaatgcaaagtggcagcgtgtgaagctacaggaaggcaactcttgacaaaaccccagcaccaatttgttagaccagatgtcaactcttcttgtggtgaagggtacaagttaagtgggagtgtttatcaggagtgtcaaggcacaattccttggtttatggagattcgtctttgtaaagaaatcacctgcccaccaccccctgttatctacaatggggcacacaccgggagttccttagaagattttccatatggaaccacggtcacttacacatgtaaccctgggccagaaagaggagtggaattcagcctcattggagagagcaccatccgttgtacaagcaatgatcaagaaagaggcacctggagtggccctgctcccctgtgtaaactttccctccttgctgtccagtgctcacatgtccatattgcaaatggatacaagatatctggcaaggaagccccatatttctacaatgacactgtgacattcaagtgttatagtggatttactttgaagggcagtagtcagattcgttgcaaagctgataacacctgggatcctgaaataccagtttgtgaaaaagaaacatgccagcatgtgagacagagtcttcaagaacttccagctggttcacgtgtggagctagttaatacgtcctgccaagatgggtaccagttgactggacatgcttatcagatgtgtcaagatgctgaaaatggaatttggttcaaaaagattccactttgtaaagttattcactgtcaccctccaccagtgattgtcaatgggaagcacacaggcatgatggcagaaaactttctatatggaaatgaagtctcttatgaatgtgaccaaggattctatctcctgggagagaaaaaattgcagtgcagaagtgattctaaaggacatggatcttggagcgggccttccccacagtgcttacgatctcctcctgtgactcgctgccctaatccagaagtcaaacatgggtacaagctcaataaaacacattctgcatattcccacaatgacatagtgtatgttgactgcaatcctggcttcatcatgaatggtagtcgcgtgattaggtgtcatactgataacacatgggtgccaggtgtgccaacttgtatcaaaaaagccttcatagggtgtccacctccgcctaagacccctaacgggaaccatactggtggaaacatagctcgattttctcctggaatgtcaatcctgtacagctgtgaccaaggctacctgctggtgggagaggcactccttctttgcacacatgagggaacctggagccaacctgcccctcattgtaaagaggtaaactgtagctcaccagcagatatggatggaatccagaaagggctggaaccaaggaaaatgtatcagtatggagctgttgtaactctggagtgtgaagatgggtatatgctggaaggcagtccccagagccagtgccaatcggatcaccaatggaaccctcccctggcggtttgcagatcccgttcacttgctcctgtcctttgtggtattgctgcaggtttgatacttcttaccttcttgattgtcgttaccttatacgtgatatcaaaacacagagcacgcaattattatacagatacaagccagaaagaagcttttcatttagaagcacgagaagtatattctgttgatccatacaacccagccagctgatcagaagacaaactggtgtgtgcctcattgcttggaattcagcggaatattgattagaaagaaactgctctaatatcagcaagtctctttatatggcctcaagatcaatgaaatgatgtcataagcgatcacttcctatatgcacttattctcaagaagaacatctttatggtaaagatgggagcccagtttcactgccatatactcttcaaggactttctgaagcctcacttatgagatgcctgaagccaggccatggctataaacaattacatggctctaaaaagttttgccctttttaaggaaggcactaaaaagagctgtcctggtatctagacccatcttctttttgaaatcagcatactcaatgttactatctgcttttggttataatgtgtttttaattatctaaagtatgaagcattttctggggttatgatggccttacctttattaggaagtatggttttattttgatagtagcttcctcctctggttggtgttaatcatttcatttttacccttacttggtttgagtttctctacattactgtatatactttgcctttccataatcactcagtgattgcaatttgcacaagtttttttaaattatgggaatcaagatttaatcctagagatttggtgtacaattcaggctttggatgtttctttagcagttttgtgataagttctagttgcttgtaaaatttcacttaataatgtgtacattagtcattcaataaattgtaattgtaaagaaaacaaa

SEQ ID NO: 292 - DNA, 1152 bp, HUMAN
cgctcctcgggctgcccctcggttgacaatggtctccaggatggtctctaccatgctatctggcctactgttttggctggcatctggatggactccagcatttgcttacagcccccggacccctgaccgggtctcagaagcagatatccagaggctgcttcatggtgttatggagcaattgggcattgccaggccccgagtggaatatccagctcaccaggccatgaatcttgtgggcccccagagcattgaaggtggagctcatgaaggacttcagcatttgggtccttttggcaacatccccaacatcgtggcagagttgactggagacaacattcctaaggactttagtgaggatcaggggtacccagaccctccaaatccctgtcctgttggaaaaacagatgatggatgtctagaaaacacccctgacactgcagagttcagtcgagagttccagttgcaccagcatctctttgatccggaacatgactatccaggcttgggcaagtggaacaagaaactcctttacgagaagatgaagggaggagagagacgaaagcggaggagtgtcaatccatatctacaaggacagagactggataatgttgttgcaaagaagtctgtcccccatttttcagatgaggataaggatccagagtaaagagaagatgctagacgaaaacccacattacctgttaggcctcagcatggcttatgtgcacgtgtaaatggagtccctgtgaatgacagcatgtttcttacatagataattatggatacaaagcagctgtatgtagatagtgtattgtcttcacaccgatgattctgctttttgctaaattagaataagagcttttttgtttcttgggtttttaaaatgtgaatctgcaatgatcataaaaattaaaatgtgaatgtcaacaataaaaagcaagactatgaaaggctcagatttcttgcagtttaaaatggtgtctgaggttgtactattttggccaagtctgtagaaagctgtcatttgattttgattatgtagttcatccagcccttgggcattgttatacaccagtaaagaaggctgtactcaagaggaggagctgacacatttcacttggctgcgtcttaataaacatgaatgcaagcattggc

SEQ ID NO: 293 - DNA, 6951 bp, HUMAN
cgtggtttgtagatgtgcttggggagaatgggggcctcttctccaagaagcccggagcctgtcgggccgccggcgcccggtctccccttctgctgcggaggatccctgctggcggttgtggtgctgcttgcgctgccggtggcctggggtcaatgcaatgccccagaatggcttccatttgccaggcctaccaacctaactgatgagtttgagtttcccattgggacatatctgaactatgaatgccgccctggttattccggaagaccgttttctatcatctgcctaaaaaactcagtctggactggtgctaaggacaggtgcagacgtaaatcatgtcgtaatcctccagatcctgtgaatggcatggtgcatgtgatcaaaggcatccagttcggatcccaaattaaatattcttgtactaaaggataccgactcattggttcctcgtctgccacatgcatcatctcaggtgatactgtcatttgggataatgaaacacctatttgtgacagaattccttgtgggctaccccccaccatcaccaatggagatttcattagcaccaacagagagaattttcactatggatcagtggtgacctaccgctgcaatcctggaagcggagggagaaaggtgtttgagcttgtgggtgagccctccatatactgcaccagcaatgacgatcaagtgggcatctggagcggccccgcccctcagtgcattatacctaacaaatgcacgcctccaaatgtggaaaatggaatattggtatctgacaacagaagcttattttccttaaatgaagttgtggagtttaggtgtcagcctggctttgtcatgaaaggaccccgccgtgtgaagtgccaggccctgaacaaatgggagccggagctaccaagctgctccagggtatgtcagccacctccagatgtcctgcatgctgagcgtacccaaagggacaaggacaacttttcacctgggcaggaagtgttctacagctgtgagcccggctacgacctcagaggggctgcgtctatgcgctgcacaccccagggagactggagccctgcagcccccacatgtgaagtgaaatcctgtgatgacttcatgggccaacttcttaatggccgtgtgctatttccagtaaatctccagcttggagcaaaagtggattttgtttgtgatgaaggatttcaattaaaaggcagctctgctagttactgtgtcttggctggaatggaaagcctttggaatagcagtgttccagtgtgtgaacaaatcttttgtccaagtcctccagttattcctaatgggagacacacaggaaaacctctggaagtctttccctttggaaaagcagtaaattacacatgcgacccccacccagacagagggacgagcttcgacctcattggagagagcaccatccgctgcacaagtgaccctcaagggaatggggtttggagcagccctgcccctcgctgtggaattctgggtcactgtcaagccccagatcattttctgtttgccaagttgaaaacccaaaccaatgcatctgactttcccattgggacatctttaaagtacgaatgccgtcctgagtactacgggaggccattctctatcacatgtctagataacctggtctggtcaagtcccaaagatgtctgtaaacgtaaatcatgtaaaactcctccagatccagtgaatggcatggtgcatgtgatcacagacatccaggttggatccagaatcaactattcttgtactacagggcaccgactcattggtcactcatctgctgaatgtatcctctcgggcaatgctgcccattggagcacgaagccgccaatttgtcaacgaattccttgtgggctaccccccaccatcgccaatggagatttcattagcaccaacagagagaattttcactatggatcagtggtgacctaccgctgcaatcctggaagcggagggagaaaggtgtttgagcttgtgggtgagccctccatatactgcaccagcaatgacgatcaagtgggcatctggagcggcccggcccctcagtgcattatacctaacaaatgcacgcctccaaatgtggaaaatggaatattggtatctgacaacagaagcttattttccttaaatgaagttgtggagtttaggtgtcagcctggctttgtcatgaaaggaccccgccgtgtgaagtgccaggccctgaacaaatgggagccggagctaccaagctgctccagggtatgtcagccacctccagatgtcctgcatgctgagcgtacccaaagggacaaggacaacttttcacccgggcaggaagtgttctacagctgtgagcccggctatgacctcagaggggctgcgtctatgcgctgcacaccccagggagactggagccctgcagcccccacatgtgaagtgaaatcctgtgatgacttcatgggccaacttcttaatggccgtgtgctatttccagtaaatctccagcttggagcaaaagtggattttgtttgtgatgaaggatttcaattaaaaggcagctctgctagttattgtgtcttggctggaatggaaagcctttggaatagcagtgttccagtgtgtgaacaaatcttttgtccaagtcctccagttattcctaatgggagacacacaggaaaacctctggaagtctttccctttggaaaagcagtaaattacacatgcgacccccacccagacagagggacgagcttcgacctcattggagagagcaccatccgctgcacaagtgaccctcaagggaatggggtttggagcagccctgcccctcgctgtggaattctgggtcactgtcaagccccagatcattttctgtttgccaagttgaaaacccaaaccaatgcatctgactttcccattgggacatctttaaagtacgaatgccgtcctgagtactacgggaggccattctctatcacatgtctagataacctggtctggtcaagtcccaaagatgtctgtaaacgtaaatcatgtaaaactcctccagatccagtgaatggcatggtgcatgtgatcacagacatccaggttggatccagaatcaactattcttgtactacagggcaccgactcattggtcactcatctgctgaatgtatcctctcaggcaatactgcccattggagcacgaagccgccaatttgtcaacgaattccttgtgggctacccccaaccatcgccaatggagatttcattagcaccaacagagagaattttcactatggatcagtggtgacctaccgctgcaatcttggaagcagagggagaaaggtgtttgagcttgtgggtgagccctccatatactgcaccagcaatgacgatcaagtgggcatctggagcggccccgcccctcagtgcattatacctaacaaatgcacgcctccaaatgtggaaaatggaatattggtatctgacaacagaagcttattttccttaaatgaagttgtggagtttaggtgtcagcctggctttgtcatgaaaggaccccgccgtgtgaagtgccaggccctgaacaaatgggagccagagttaccaagctgctccagggtgtgtcagccgcctccagaaatcctgcatggtgagcataccccaagccatcaggacaacttttcacctgggcaggaagtgttctacagctgtgagcctggctatgacctcagaggggctgcgtctctgcactgcacaccccagggagactggagccctgaagccccgagatgtgcagtgaaatcctgtgatgacttcttgggtcaactccctcatggccgtgtgctatttccacttaatctccagcttggggcaaaggtgtcctttgtctgtgatgaagggtttcgcttaaagggcagttccgttagtcattgtgtcttggttggaatgagaagcctttggaataacagtgttcctgtgtgtgaacatatcttttgtccaaatcctccagctatccttaatgggagacacacaggaactccctctggagatattccctatggaaaagaaatatcttacacatgtgacccccacccagacagagggatgaccttcaacctcattggggagagcaccatccgctgcacaagtgaccctcatgggaatggggtttggagcagccctgcccctcgctgtgaactttctgttcgtgctggtcactgtaaaaccccagagcagtttccatttgccagtcctacgatcccaattaatgactttgagtttccagtcgggacatctttgaattatgaatgccgtcctgggtattttgggaaaatgttctctatctcctgcctagaaaacttggtctggtcaagtgttgaagacaactgtagacgaaaatcatgtggacctccaccagaacccttcaatggaatggtgcatataaacacagatacacagtttggatcaacagttaattattcttgtaatgaagggtttcgactcattggttccccatctactacttgtctcgtctcaggcaataatgtcacatgggataagaaggcacctatttgtgagatcatatcttgtgagccacctccaaccatatccaatggagacttctacagcaacaatagaacatcttttcacaatggaacggtggtaacttaccagtgccacactggaccagatggagaacagctgtttgagcttgtgggagaacggtcaatatattgcaccagcaaagatgatcaagttggtgtttggagcagccctccccctcggtgtatttctactaataaatgcacagctccagaagttgaaaatgcaattagagtaccaggaaacaggagtttcttttccctcactgagatcatcagatttagatgtcagcccgggtttgtcatggtagggtcccacactgtgcagtgccagaccaatggcagatgggggcccaagctgccacactgctccagggtgtgtcagccgcctccagaaatcctgcatggtgagcataccctaagccatcaggacaacttttcacctgggcaggaagtgttctacagctgtgagcccagctatgacctcagaggggctgcgtctctgcactgcacgccccagggagactggagccctgaagcccctagatgtacagtgaaatcctgtgatgacttcctgggccaactccctcatggccgtgtgctacttccacttaatctccagcttggggcaaaggtgtcctttgtttgcgatgaagggttccgattaaaaggcaggtctgctagtcattgtgtcttggctggaatgaaagccctttggaatagcagtgttccagtgtgtgaacaaatcttttgtccaaatcctccagctatccttaatgggagacacacaggaactccctttggagatattccctatggaaaagaaatatcttacgcatgcgacacccacccagacagagggatgaccttcaacctcattggggagagctccatccgctgcacaagtgaccctcaagggaatggggtttggagcagccctgcccctcgctgtgaactttctgttcctgctgcctgcccacatccacccaagatccaaaacgggcattacattggaggacacgtatctctatatcttcctgggatgacaatcagctacacttgtgaccccggctacctgttagtgggaaagggcttcattttctgtacagaccagggaatctggagccaattggatcattattgcaaagaagtaaattgtagcttcccactgtttatgaatggaatctcgaaggagttagaaatgaaaaaagtatatcactatggagattatgtgactttgaagtgtgaagatgggtatactctggaaggcagtccctggagccagtgccaggcggatgacagatgggaccctcctctggccaaatgtacctctcgtgcacatgatgctctcatagttggcactttatctggtacgatcttctttattttactcatcattttcctctcttggataattctaaagcacagaaaaggcaataatgcacatgaaaaccctaaagaagtggctatccatttacattctcaaggaggcagcagcgttcatccccgaactctgcaaacaaatgaagaaaatagcagggtccttccttgacaaagtactatacagctgaagaacatctcgaatacaattttggtgggaaaggagccaattgatttcaacagaatcagatctgagcttcataaagtctttgaagtgacttcacagagacgcagacatgtgcacttgaagatgctgccccttccctggtacctagcaaagctcctgcctctttgtgtgcgtcactgtgaaacccccacccttctgcctcgtgctaaacgcacacagtatctagtcaggggaaaagactgcatttaggagatagaaaatagtttggattacttaaaggaataaggtgttgcctggaatttctggtttgtaaggtggtcactgttcttttttaaaatatttgtaatatggaatgggctcagtaagaagagcttggaaaatgcagaaagttatgaaaaataagtcacttataattatgctacctactgataaccactcctaatattttgattcattttctgcctatcttctttcacatatgtgtttttttacatacgtacttttccccccttagtttgtttccttttattttatagagcagaaccctagtcttttaaacagtttagagtgaaatatatgctatatcagtttttactttctctagggagaaaaattaatttactagaaaggcatgaaatgatcatgggaagagtggttaagactactgaagagaaatatttggaaaataagatttcgatatcttctttttttttgagatggagtctggctctgtctcccaggctggagtgcagtggcgtaatctcggctcactgcaacgtccgcctcccg

SEQ ID NO: 294 - DNA, 4596 bp, HUMAN
aagcgggggactgtgccgtgtggaacgtgtagctgttgagaggtggactctgttaccattgaggatgtttggaggatgagtatgtgtggcagaggcacacataaacaggcagagaccctttgcccctgcctttctcccccaacccaaggctgacctgtgttctcccaggtctgggattctaagtgacctgctctgtgtttggtctctctcaggatgagcacaagcctgggagatggcagtgatggaaatggcctgcccaggtgcccctggctcagcagtggggcagcagaaggaactccccaagccaaaggagaagacgccgccactggggaagaaacagagctccgtctacaagcttgaggccgtggagaagagccctgtgttctgcggaaagtgggagatcctgaatgacgtgattaccaagggcacagccaaggaaggctccgaggcagggccagctgccatctctatcatcgcccaggctgagtgtgagaatagccaagagttcagccccaccttttcagaacgcattttcatcgctgggtccaaacagtacagccagtccgagagtcttgatcagatccccaacaatgtggcccatgctacagagggcaaaatggcccgtgtgtgttggaagggaaagcgtcgcagcaaagcccggaagaaacggaagaagaagagctcaaagtccctggctcatgcaggagtggccttggccaaacccctccccaggacccctgagcaggagagctgcaccatcccagtgcaggaggatgagtctccactcggcgccccatatgttagaaacaccccgcagttcaccaagcctctgaaggaaccaggccttgggcaactctgttttaagcagcttggcgagggcctacggccggctctgcctcgatcagaactccacaaactgatcagccccttgcaatgtctgaaccacgtgtggaaactgcaccacccccaggacggaggccccctgcccctgcccacgcaccccttcccctatagcagactgcctcatcccttcccattccaccctctccagccctggaaacctcaccctctggagtccttcctgggcaaactggcctgtgtagacagccagaaacccttgcctgacccacacctgagcaaactggcctgtgtagacagtccaaagcccctgcctggcccacacctggagcccagctgcctgtctcgtggtgcccatgagaagttttctgtggaggaatacctagtgcatgctctgcaaggcagcgtgagctcaagccaggcccacagcctgaccagcctggccaagacctgggcagcacggggctccagatcccgggagcccagccccaaaactgaggacaacgagggtgtcctgctcactgagaaactcaagccagtggattatgagtaccgagaagaagtccactgggccacgcaccagctccgcctgggcagaggctccttcggagaggtgcacaggatggaggacaagcagactggcttccagtgcgctgtcaaaaaggtgcggctggaagtatttcgggcagaggagctgatggcatgtgcaggattgacctcacccagaattgtccctttgtatggagctgtgagagaagggccttgggtcaacatcttcatggagctgctggaaggtggctccctgggccagctggtcaaggagcagggctgtctcccagaggaccgggccctgtactacctgggccaggccctggagggtctggaatacctccactcacgaaggattctgcatggggacgtcaaagctgacaacgtgctcctgtccagcgatgggagccacgcagccctctgtgactttggccatgctgtgtgtcttcaacctgatggcctgggaaagtccttgctcacaggggactacatccctggcacagagacccacatggctccggaggtggtgctgggcaggagctgcgacgccaaggtggatgtctggagcagctgctgtatgatgctgcacatgctcaacggctgccacccctggactcagttcttccgagggccgctctgcctcaagattgccagcgagcctccgcctgtgagggagatcccaccctcctgcgcccctctcacagcccaggccatccaagaggggctgaggaaagagcccatccaccgcgtgtctgcagcggagctgggagggaaggtgaaccgggcactacagcaagtgggaggtctgaagagcccttggaggggagaatataaagaaccaagacatccaccgccaaatcaagccaattaccaccagaccctccatgcccagccgagagagctttcgccaagggccccagggccccggccagctgaggagacaacaggcagagcccctaagctccagcctcctctcccaccagagcccccagagccaaacaagtctcctcccttgactttgagcaaggaggagtctgggatgtgggaacccttacctctgtcctccctggagccagcccctgccagaaaccccagctcaccagagcggaaagcaaccgtcccggagcaggaactgcagcagctggaaatagaattattcctcaacagcctgtcccagccattttctctggaggagcaggagcaaattctctcgtgcctcagcatcgacagcctctccctgtcggatgacagtgagaagaacccatcaaaggcctctcaaagctcgcgggacaccctgagctcaggcgtacactcctggagcagccaggccgaggctcgaagctccagctggaacatggtgctggcccgggggcggcccaccgacaccccaagctatttcaatggtgtgaaagtccaaatacagtctcttaatggtgaacacctgcacatccgggagttccaccgggtcaaagtgggagacatcgccactggcatcagcagccagatcccagctgcagccttcagcttggtcaccaaagacgggcagcctgttcgctacgacatggaggtgccagactcgggcatcgacctgcagtgcacactggcccctgatggcagcttcgcctggagctggagggtcaagcatggccagctggagaacaggccctaaccctgccctccaccgccggctccacactgccggaaagcagccttcctgctcggtgcacgatgctgccctgaaaacacaggctcagccgttcccaggggattgccagccccccggctcacagtgggaaccagggcctcgcagcagcaaggtgggggcaagcagaatgcctcccaggatttcacacctgagccctgccccaccctgctgaaaaaacatccgccacgtgaagagacagaaggaggatggcaggagttacctggggaaacaaaacagggatctttttctgcccctgctccagtcgagttggcctgacccgcttggatcagtgaccatttgttggcagacaggggagagcagcttccagcctgggtcagaaggggtgggcgagcccttcggcccctcaccctccaggctgctgtgagagtgtcaagtgtgtaagggcccaaactcaggttcagtgcagaaccaggtcagcaggtatgcccgcccgtaggttaagggggccctctaaaccccttgcctggcctcacctggccagctcaccccttttgggtgtaggggaaaagaatgcctgaccctgggaaggctccctggtagaatacaccacacttttcaggttgttgcaacacaggtcctgagttgacctctggttcagccaaggaccaaagaaggtgtgtaagtgaagtggttctcagtccccagacatgtgcccctttgctgctggctaccactcttccccagagcagcaggccccgagccccttcaggcccagcactgccccagactcgctggcactcagttccctcatctgtaaaggtgaagggtgatgcaggatatgcctgacaggaacagtctgtggatggacatgatcagtgctaaggaaagcagcagagagagacgtccggcgccccagccccactatcagtgtccagcgtgctggttccccagagcacagctcagcatcacactgacactcaccctgccctgcccctggccagagggtactgccgacggcactttgcactctgatgacctcaaagcactttcatggctgccctctggcagggcagggcagggcagtgacactgtaggagcatagcaagccaggagatggggtgaagggacacagtcttgagctgtccacatgcatgtgactcctcaaacctcttccagatttctctaagaatagcacccccttccccattgccccagcttagcctcttctcccaggggagctactcaggactcacgtagcattaaatcagctgtgaatcgtcagggggtgtctgctagcctcaacctcctggggcaggggacgccgagactccgtgggagaagctcattcccacatcttgccaagacagcctttgtccagctgtccacattgagtcagactgctcccggggagagagccccggcccccagcacataaagaactgcagccttggtactgcagagtctgggttgtagagaactctttgtaagcaataaagtttggggtgatgacaaatgttaaaaaa

SEQ ID NO: 295 - DNA, 3424 bp, HUMAN
aggatcagaacaatgcctccaagaccatcatcaggtgaactgtggggcatccacttgatgcccccaagaatcctagtggaatgtttactaccaaatggaatgatagtgactttagaatgcctccgtgaggctacattagtaactataaagcatgaactatttaaagaagcaagaaaataccctctccatcaacttcttcaagatgaatcttcttacattttcgtaagtgttacccaagaagcagaaagggaagaattttttgatgaaacaagacgactttgtgatcttcggctttttcaaccatttttaaaagtaattgaaccagtaggcaaccgtgaagaaaagatcctcaatcgagaaattggttttgctatcggcatgccagtgtgcgaatttgatatggttaaagatcctgaagtacaggacttccgaagaaatattcttaatgtttgtaaagaagctgtggatcttagggatcttaattcacctcatagtagagcaatgtatgtctatccgccacatgtagaatcttcaccagagctgccaaagcacatatataataaattggatagaggccaaataatagtggtgatttgggtaatagtttctccaaataatgacaagcagaagtatactctgaaaatcaaccatgactgtgtgccagaacaagtaattgctgaagcaatcaggaaaaaaactagaagtatgttgctatcatctgaacaattaaaactctgtgttttagaatatcagggcaagtacattttaaaagtgtgtggatgtgatgaatacttcctagaaaaatatcctctgagtcagtataagtatataagaagctgtataatgcttgggaggatgcccaatttgaagatgatggctaaagaaagcctttattctcaactgccaatggactgttttacaatgccatcttattccagacgcatttccacagctacaccatatatgaatggagaaacatctacaaaatccctttgggttataaatagagcactcagaataaaaattctttgtgcaacctacgtgaatctaaatattcgagacattgacaagatttatgttcgaacaggtatctaccatggaggagaacccttatgtgacaatgtgaacactcaaagagtaccttgttccaatcccaggtggaatgaatggctgaattatgatatatacattcctgatcttcctcgtgctgctcgactttgcctttccatttgctctgttaaaggccgaaagggtgctaaagaggaacactgtccattggcatggggaaatataaacttgtttgattacacagacactctagtatctggaaaaatggctttgaatctttggccagtacctcatggattagaagatttgctgaaccctattggtgttactggatcaaatccaaataaagaaactccatgcttagagttggagtttgactggttcagcagtgtggtaaagttcccagatatgtcagtgattgaagagcatgccaattggtctgtatcccgagaagcaggatttagctattcccacgcaggactgagtaacagactagctagagacaatgaattaagggaaaatgacaaagaacagctcaaagcaatttctacacgagatcctctctctgaaatcactgagcaggagaaagattttctatggagtcacagacactattgtgtaactatccccgaaattctacccaaattgcttctgtctgttaaatggaattctagagatgaagtagcccagatgtattgcttggtaaaagattggcctccaatcaaacctgaacaggctatggaacttctggactgtaattacccagatcctatggttcgaggttttgctgttcggtgcttggaaaaatatttaacagatgacaaactttctcagtatttaattcagctagtacaggtcctaaaatatgaacaatatttggataacttgcttgtgagatttttactgaagaaagcattgactaatcaaaggattgggcactttttcttttggcatttaaaatctgagatgcacaataaaacagttagccagaggtttggcctgcttttggagtcctattgtcgtgcatgtgggatgtatttgaagcacctgaataggcaagtcgaggcaatggaaaagctcattaacttaactgacattctcaaacaggagaggaaggatgaaacacaaaaggtacagatgaagtttttagttgagcaaatgaggcgaccagatttcatggatgccctacagggcttgctgtctcctctaaaccctgctcatcaactaggaaacctcaggcttaaagagtgtcgaattatgtcttctgcaaaaaggccactgtggttgaattgggagaacccagacatcatgtcagagttactgtttcagaacaatgagatcatctttaaaaatggggatgatttacggcaagatatgctaacacttcaaattattcgtattatggaaaatatctggcaaaatcaaggtcttgatcttcgaatgttaccttatggttgtctgtcaatcggtgactgtgtgggacttattgaggtggtgcgaaattctcacactattatgcaaattcagtgcaaaggcggcttgaaaggtgcactgcagttcaacagccacacactacatcagtggctcaaagacaagaacaaaggagaaatatatgatgcagccattgacctgtttacacgttcatgtgctggatactgtgtagctaccttcattttgggaattggagatcgtcacaatagtaacatcatggtgaaagacgatggacaactgtttcatatagattttggacactttttggatcacaagaagaaaaaatttggttataaacgagaacgtgtgccatttgttttgacacaggatttcttaatagtgattagtaaaggagcccaagaatgcacaaagacaagagaatttgagaggtttcaggagatgtgttacaaggcttatctagctattcgacagcatgccaatctcttcataaatcttttctcaatgatgcttggctctggaatgccagaactacaatcttttgatgacattgcatacattcgaaagaccctagccttagataaaactgagcaagaggctttggagtatttcatgaaacaaatgaatgatgcacatcatggtggctggacaacaaaaatggattggatcttccacacaattaaacagcatgcattgaactgaaagataactgagaaaatgaaagctcactctggattccacactgcactgttaataactctcagcaggcaaagaccgattgcataggaattgcacaatccatgaacagcattagatttacagcaagaacagaaataaaatactatataatttaaataatgtaaacgcaaacagggtttgatagcacttaaactagttcatttcaaaa

SEQ ID NO: 296 - DNA, 2484 bp, HUMAN
gggcccggcgctcgctgctcccgcggcccgcgccatgccctcctacacggtcaccgtggccactggcagccagtggttcgccggcactgacgactacatctacctcagcctcgtgggctcggcgggctgcagcgagaagcacctgctggacaagcccttctacaacgacttcgagcgtggcgcggtggattcatacgacgtgactgtggacgaggaactgggcgagatccagctggtcagaatcgagaagcgcaagtactggctgaatgacgactggtacctgaagtacatcacgctgaagacgccccacggggactacatcgagttcccctgctaccgctggatcaccggcgatgtcgaggttgtcctgagggatggacgcgcaaagttggcccgagatgaccaaattcacattctcaagcaacaccgacgtaaagaactggaaacacggcaaaaacaatatcgatggatggagtggaaccctggcttccccttgagcatcgatgccaaatgccacaaggatttaccccgtgatatccagtttgatagtgaaaaaggagtggactttgttctgaattactccaaagcgatggagaacctgttcatcaaccgcttcatgcacatgttccagtcttcttggaatgacttcgccgactttgagaaaatctttgtcaagatcagcaacactatttctgagcgggtcatgaatcactggcaggaagacctgatgtttggctaccagttcctgaatggctgcaaccctgtgttgatccggcgctgcacagagctgcccgagaagctcccggtgaccacggagatggtagagtgcagcctggagcggcagctcagcttggagcaggaggtccagcaagggaacattttcatcgtggactttgagctgctggatggcatcgatgccaacaaaacagacccctgcacactccagttcctggccgctcccatctgcttgctgtataagaacctggccaacaagattgtccccattgccatccagctcaaccaaatcccgggagatgagaaccctattttcctcccttcggatgcaaaatacgactggcttttggccaaaatctgggtgcgttccagtgacttccacgtccaccagaccatcacccaccttctgcgaacacatctggtgtctgaggtttttggcattgcaatgtaccgccagctgcctgctgtgcaccccattttcaagctgctggtggcacacgtgagattcaccattgcaatcaacaccaaggcccgtgagcagctcatctgcgagtgtggcctctttgacaaggccaacgccacagggggcggtgggcacgtgcagatggtgcagagggccatgaaggacctgacctatgcctccctgtgctttcccgaggccatcaaggcccggggcatggagagcaaagaagacatcccctactacttctaccgggacgacgggctcctggtgtgggaagccatcaggacgttcacggccgaggtggtagacatctactacgagggcgaccaggtggtggaggaggacccggagctgcaggacttcgtgaacgatgtctacgtgtacggcatgcggggccgcaagtcctcaggcttccccaagtcggtcaagagccgggagcagctgtcggagtacctgaccgtggtgatcttcaccgcctccgcccagcacgccgcggtcaacttcggccagtacgactggtgctcctggatccccaatgcgcccccaaccatgcgagccccgccaccgactgccaagggcgtggtgaccattgagcagatcgtggacacgctgcccgaccgcggccgctcctgctggcatctgggtgcagtgtgggcgctgagccagttccaggaaaacgagctgttcctgggcatgtacccagaagagcattttatcgagaagcctgtgaaggaagccatggcccgattccgcaagaacctcgaggccattgtcagcgtgattgctgagcgcaacaagaagaagcagctgccatattactacttgtccccagaccggattccgaacagtgtggccatctgagcacactgccagtctcactgtgggaaggccagctgccccagccagatggactccagcctgcctggcaggtgtctggccaggcctcttggcagtcacatctcttcctccgaggccagtacctttccatttattctttgatcttcagggaactgcatagattgatcaaagtgtaaacaccatagggacccattctacacagagcaggactgcacagcgtcctgtccacacccagctcagcatttccacaccaagcagcaacagcaaatcacgaccactgatagatgtctattcttgttggagacatgggatgattattttctgttctatttgtgcttagtccaattccttgcacatagtaggtacccaattcaattactattgaatgaattaagaattggttgccataaaaataaatcagttcattt

SEQ ID NO: 297 - DNA, 797 bp, HUMAN
agtctctgctcttcccagcctctccggcgcgctccaagggcttcccgtcgggaccatgcgcggcagtgagctcccgctggtcctgctggcgctggtcctctgcctagcgccccgggggcgagcggtcccgctgcctgcgggcggagggaccgtgctgaccaagatgtacccgcgcggcaaccactgggcggtggggcacttaatggggaaaaagagcacaggggagtcttcttctgtttctgagagagggagcctgaagcagcagctgagagagtacatcaggtgggaagaagctgcaaggaatttgctgggtctcatagaagcaaaggagaacagaaaccaccagccacctcaacccaaggccttgggcaatcagcagccttcgtgggattcagaggatagcagcaacttcaaagatgtaggttcaaaaggcaaagttggtagactctctgctccaggttctcaacgtgaaggaaggaacccccagctgaaccagcaatgataatgatggcctctctcaaaagagaaaaacaaaacccctaagagactgagttctgcaagcatcagttctacggatcatcaacaagatttccttgtgcaaaatatttgactattctgtatctttcatccttgactaaattcgtgattttcaagcagcatcttctggtttaaacttgtttgctgtgaacaattgtcgaaaagagtcttccaattaatgcttttttatatctaggctacctgttggttagattcaaggccccgagctgttaccattcacaataaaagcttaaacacat

SEQ ID NO: 298 - DNA, 5784 bp, HUMAN
acggcatccagtacagaggggctggacttggacccctgcagcagccctgcacaggagaagcggcatataaagccgcgctgcccgggagccgctcggccacgtccaccggagcatcctgcactgcagggccggtctctcgctccagcagagcctgcgcctttctgactcggtccggaacactgaaaccagtcatcactgcatctttttggcaaaccaggagctcagctgcaggaggcaggatggtctggaggctggtcctgctggctctgtgggtgtggcccagcacgcaagctggtcaccaggacaaagacacgaccttcgaccttttcagtatcagcaacatcaaccgcaagaccattggcgccaagcagttccgcgggcccgaccccggcgtgccggcttaccgcttcgtgcgctttgactacatcccaccggtgaacgcagatgacctcagcaagatcaccaagatcatgcggcagaaggagggcttcttcctcacggcccagctcaagcaggacggcaagtccaggggcacgctgttggctctggagggccccggtctctcccagaggcagttcgagatcgtctccaacggccccgcggacacgctggatctcacctactggattgacggcacccggcatgtggtctccctggaggacgtcggcctggctgactcgcagtggaagaacgtcaccgtgcaggtggctggcgagacctacagcttgcacgtgggctgcgacctcataggaccagttgctctggacgagcccttctacgagcacctgcaggcggaaaagagccggatgtacgtggccaaaggctctgccagagagagtcacttcaggggtttgcttcagaacgtccacctagtgtttgaaaactctgtggaagatattctaagcaagaagggttgccagcaaggccagggagctgagatcaacgccatcagtgagaacacagagacgctgcgcctgggtccgcatgtcaccaccgagtacgtgggccccagctcggagaggaggcccgaggtgtgcgaacgctcgtgcgaggagctgggaaacatggtccaggagctctcggggctccacgtcctcgtgaaccagctcagcgagaacctcaagagagtgtcgaatgataaccagtttctctgggagctcattggtggccctcctaagacaaggaacatgtcagcttgctggcaggatggccggttctttgcggaaaatgaaacgtgggtggtggacagctgcaccacgtgtacctgcaagaaatttaaaaccatttgccaccaaatcacctgcccgcctgcaacctgcgccagtccatcctttgtggaaggcgaatgctgcccttcctgcctccactcggtggacggtgaggagggctggtctccgtgggcagagtggacccagtgctccgtgacgtgtggctctgggacccagcagagaggccggtcctgtgacgtcaccagcaacacctgcttggggccctcgatccagacacgggcttgcagtctgagcaagtgtgacacccgcatccggcaggacggcggctggagccactggtcaccttggtcttcatgctctgtgacctgtggagttggcaatatcacacgcatccgtctctgcaactccccagtgccccagatggggggcaagaattgcaaagggagtggccgggagaccaaagcctgccagggcgccccatgcccaatcgatggccgctggagcccctggtccccgtggtcggcctgcactgtcacctgtgccggtgggatccgggagcgcacccgggtctgcaacagccctgagcctcagtacggagggaaggcctgcgtgggggatgtgcaggagcgtcagatgtgcaacaagaggagctgccccgtggatggctgtttatccaacccctgcttcccgggagcccagtgcagcagcttccccgatgggtcctggtcatgcggcttctgccctgtgggcttcttgggcaatggcacccactgtgaggacctggacgagtgtgccctggtccccgacatctgcttctccaccagcaaggtgcctcgctgtgtcaacactcagcctggcttccactgcctgccctgcccgccccgatacagagggaaccagcccgtcggggtcggcctggaagcagccaagacggaaaagcaagtgtgtgagcccgaaaacccatgcaaggacaagacacacaactgccacaagcacgcggagtgcatctacctgggtcacttcagcgaccccatgtacaagtgcgagtgccagacaggctacgcgggcgacgggctcatctgcggggaggactcggacctggacggctggcccaacctcaatctggtctgcgccaccaacgccacctaccactgcatcaaggataactgcccccatctgccaaattctgggcaggaagactttgacaaggacgggattggcgatgcctgtgatgatgacgatgacaatgacggtgtgaccgatgagaaggacaactgccagctcctcttcaatccccgccaggctgactatgacaaggatgaggttggggaccgctgtgacaactgcccttacgtgcacaaccctgcccagatcgacacagacaacaatggagagggtgacgcctgctccgtggacattgatggggacgatgtcttcaatgaacgagacaattgtccctacgtctacaacactgaccagagggacacggatggtgacggtgtgggggatcactgtgacaactgccccctggtgcacaaccctgaccagaccgacgtggacaatgaccttgttggggaccagtgtgacaacaacgaggacatagatgacgacggccaccagaacaaccaggacaactgcccctacatctccaacgccaaccaggctgaccatgacagagacggccagggcgacgcctgtgaccctgatgatgacaacgatggcgtccccgatgacagggacaactgccggcttgtgttcaacccagaccaggaggacttggacggtgatggacggggtgatatttgtaaagatgattttgacaatgacaacatcccagatattgatgatgtgtgtcctgaaaacaatgccatcagtgagacagacttcaggaacttccagatggtccccttggatcccaaagggaccacccaaattgatcccaactgggtcattcgccatcaaggcaaggagctggttcagacagccaactcggaccccggcatcgctgtaggttttgacgagtttgggtctgtggacttcagtggcacattctacgtaaacactgaccgggacgacgactatgctggcttcgtctttggttaccagtcaagcagccgcttctatgtggtgatgtggaagcaggtgacgcagacctactgggaggaccagcccacgcgggcctatggctactccggcgtgtccctcaaggtggtgaactccaccacggggacgggcgagcacctgaggaacgcgctgtggcacacggggaacacgccggggcaggtgcgaaccttatggcacgaccccaggaacattggctggaaggactacacggcctataggtggcacctgactcacaggcccaagaccggctacatcagagtcttagtgcatgaaggaaaacaggtcatggcagactcaggacctatctatgaccaaacctacgctggcgggcggctgggtctatttgtcttctctcaagaaatggtctatttctcagacctcaagtacgaatgcagagatatttaaacaagatttgctgcatttccggcaatgccctgtgcatgccatggtccctagacacctcagttcattgtggtccttgcggcttctctctctagcagcacctcctgtcccttgaccttaactctgatggttcttcacctcctgccagcaaccccaaacccaagtgccttcagaggataaatatcaatggaactcagagatgaacatctaacccactagaggaaaccagtttggtgatatatgagactttatgtggagtgaaaattgggcatgccattacattgctttttcttgtttgtttaaaaagaatgacgtttacatataaaatgtaattacttattgtatttatgtgtatatggagttgaagggaatactgtgcataagccattatgataaattaagcatgaaaaatattgctgaactacttttggtgcttaaagttgtcactattcttgaattagagttgctctacaatgacacacaaatcccgctaaataaattataaacaagggtcaattcaaatttgaagtaatgttttagtaaggagagattagaagacaacaggcatagcaaatgacataagctaccgattaactaatcggaacatgtaaaacagttacaaaaataaacgaactctcctcttgtcctacaatgaaagccctcatgtgcagtagagatgcagtttcatcaaagaacaaacatccttgcaaatgggtgtgacgcggttccagatgtggatttggcaaaacctcatttaagtaaaaggttagcagagcaaagtgcggtgctttagctgctgcttgtgccgttgtggcgtcggggaggctcctgcctgagcttccttccccagctttgctgcctgagaggaaccagagcagacgcacaggccggaaaaggcgcatctaacgcgtatctaggctttggtaactgcggacaagttgcttttacctgatttgatgatacatttcattaaggttccagttataaatattttgttaatatttattaagtgactatagaatgcaactccatttaccagtaacttattttaaatatgcctagtaacacatatgtagtataatttctagaaacaaacatctaataagtatataatcctgtgaaaatatgaggcttgataatattaggttgtcacgatgaagcatgctagaagctgtaacagaatacatagagaataatgaggagtttatgatggaaccttaatatataatgttgccagcgattttagttcaatatttgttactgttatctatctgctgtatatggaattcttttaattcaaacgctgaaaacgaatcagcatttagtcttgccaggcacacccaataatcagtcatgtgtaatatgcacaagtttgtttttgtttttgttttttttgttggttggtttttttgctttaagttgcatgatctttctgcaggaaatagtcactcatcccactccacataaggggtttagtaagagaagtctgtctgtctgatgatggatagggggcaaatctttttcccctttctgttaatagtcatcacatttctatgccaaacaggaacgatccataactttagtcttaatgtacacattgcattttgataaaattaattttgttgtttcctttgaggttgatcgttgtgttgttttgctgcactttttacttttttgcgtgtggagctgtattcccgagacaacgaagcgttgggatacttcattaaatgtagcgactgtcaacagcgtgcaggttttctgtttctgtgttgtggggtcaaccgtacaatggtgtgggaatgacgatgatgtgaatatttagaatgtaccatattttttgtaaattatttatgtttttctaaacaaatttatcgtataggttgatgaaacgtcatgtgttttgccaaagactgtaaatatttatttatgtgttcacatggtcaaaatttcaccactgaaaccctgcacttagctagaacctcatttttaaagattaacaacaggaaataaattgtaaaaaaggttttct

SEQ ID NO: 299 - DNA, 800 bp, HUMAN
accaccatgaatccactcctgatccttacctttgtggcagctgctcttgctgccccctttgatgatgatgacaagatcgttgggggctacaactgtgaggagaattctgtcccctaccaggtgtccctgaattctggctaccacttctgtggtggctccctcatcaacgaacagtgggtggtatcagcaggccactgctacaagtcccgcatccaggtgagactgggagagcacaacatcgaagtcctggaggggaatgagcagttcatcaatgcagccaagatcatccgccacccccaatacgacaggaagactctgaacaatgacatcatgttaatcaagctctcctcacgtgcagtaatcaacgcccgcgtgtccaccatctctctgcccaccgcccctccagccactggcacgaagtgcctcatctctggctggggcaacactgcgagctctggcgccgactacccagacgagctgcagtgcctggatgctcctgtgctgagccaggctaagtgtgaagcctcctaccctggaaagattaccagcaacatgttctgtgtgggcttccttgagggaggcaaggattcatgtcagggtgattctggtggccctgtggtctgcaatggacagctccaaggagttgtctcctggggtgatggctgtgcccagaagaacaagcctggagtctacaccaaggtctacaactacgtgaaatggattaagaacaccatagctgccaatagctaaagcccccagtatctcttcagtctctataccaataaagtgaccctgttctc

SEQ ID NO: 300 - DNA, 1113 bp, HUMAN
gaattccgggaacgaaagagaagctctatctcccctccaggagcccagctatgaactccttctccacaagcgccttcggtccagttgccttctccctggggctgctcctggtgttgcctgctgccttccctgccccagtacccccaggagaagattccaaagatgtagccgccccacacagacagccactcacctcttcagaacgaattgacaaacaaattcggtacatcctcgacggcatctcagccctgagaaaggagacatgtaacaagagtaacatgtgtgaaagcagcaaagaggcactggcagaaaacaacctgaaccttccaaagatggctgaaaaagatggatgcttccaatctggattcaatgaggagacttgcctggtgaaaatcatcactggtcttttggagtttgaggtatacctagagtacctccagaacagatttgagagtagtgaggaacaagccagagctgtgcagatgagtacaaaagtcctgatccagttcctgcagaaaaaggcaaagaatctagatgcaataaccacccctgacccaaccacaaatgccagcctgctgacgaagctgcaggcacagaaccagtggctgcaggacatgacaactcatctcattctgcgcagctttaaggagttcctgcagtccagcctgagggctcttcggcaaatgtagcatgggcacctcagattgttgttgttaatgggcattccttcttctggtcagaaacctgtccactgggcacagaacttatgttgttctctatggagaactaaaagtatgagcgttaggacactattttaattatttttaatttattaatatttaaatatgtgaagctgagttaatttatgtaagtcatatttatatttttaagaagtaccacttgaaacattttatgtattagttttgaaataataatggaaagtggctatgcagtttgaatatcctttgtttcagagccagatcatttcttggaaagtgtaggcttacctcaaataaatggctaacttatacatatttttaaagaaatatttatattgtatttatataatgtataaatggtttttataccaataaatggcattttaaaaaattc

SEQ ID NO: 301 - DNA, 2360 bp, HUMAN
gctacgcgggccacgctgctggctggcctgacctaggcgcgcggggtcgggcggccgcgcgggcgggctgagtgagcaagacaagacactcaagaagagcgagctgcgcctgggtcccggccaggcttgcacgcagaggcgggcggcagacggtgcccggcggaatctcctgagctccgccgcccagctctggtgccagcgcccagtggccgccgcttcgaaagtgactggtgcctcgccgcctcctctcggtgcgggaccatgaagctgctgccgtcggtggtgctgaagctctttctggctgcagttctctcggcactggtgactggcgagagcctggagcggcttcggagagggctagctgctggaaccagcaacccggaccctcccactgtatccacggaccagctgctacccctaggaggcggccgggaccggaaagtccgtgacttgcaagaggcagatctggaccttttgagagtcactttatcctccaagccacaagcactggccacaccaaacaaggaggagcacgggaaaagaaagaagaaaggcaaggggctagggaagaagagggacccatgtcttcggaaatacaaggacttctgcatccatggagaatgcaaatatgtgaaggagctccgggctccctcctgcatctgccacccgggttaccatggagagaggtgtcatgggctgagcctcccagtggaaaatcgcttatatacctatgaccacacaaccatcctggccgtggtggctgtggtgctgtcatctgtctgtctgctggtcatcgtggggcttctcatgtttaggtaccataggagaggaggttatgatgtggaaaatgaagagaaagtgaagttgggcatgactaattcccactgagagagacttgtgctcaaggaatcggctggggactgctacctctgagaagacacaaggtgatttcagactgcagaggggaaagacttccatctagtcacaaagactccttcgtccccagttgccgtctaggattgggcctcccataattgctttgccaaaataccagagccttcaagtgccaaacagagtatgtccgatggtatctgggtaagaagaaagcaaaagcaagggaccttcatgcccttctgattcccctccaccaaaccccacttcccctcataagtttgtttaaacacttatcttctggattagaatgccggttaaattccatatgctccaggatctttgactgaaaaaaaaaaagaagaagaagaaggagagcaagaaggaaagatttgtgaactggaagaaagcaacaaagattgagaagccatgtactcaagtaccaccaagggatctgccattgggaccctccagtgctggatttgatgagttaactgtgaaataccacaagcctgagaactgaattttgggacttctacccagatggaaaaataacaactatttttgttgttgttgtttgtaaatgcctcttaaattatatatttattttattctatgtatgttaatttatttagtttttaacaatctaacaataatatttcaagtgcctagactgttactttggcaatttcctggccctccactcctcatccccacaatctggcttagtgccacccacctttgccacaaagctaggatggttctgtgacccatctgtagtaatttattgtctgtctacatttctgcagatcttccgtggtcagagtgccactgcgggagctctgtatggtcaggatgtaggggttaacttggtcagagccactctatgagttggacttcagtcttgcctaggcgattttgtctaccatttgtgttttgaaagcccaaggtgctgatgtcaaagtgtaacagatatcagtgtctccccgtgtcctctccctgccaagtctcagaagaggttgggcttccatgcctgtagctttcctggtccctcacccccatggccccaggccacagcgtgggaactcactttcccttgtgtcaagacatttctctaactcctgccattcttctggtgctactccatgcaggggtcagtgcagcagaggacagtctggagaaggtattagcaaagcaaaaggctgagaaggaacagggaacattggagctgactgttcttggtaactgattacctgccaattgctaccgagaaggttggaggtggggaaggctttgtataatcccacccacctcaccaaaacgatgaaggtatgctgtcatggtcctttctggaagtttctggtgccatttctgaactgttacaacttgtatttccaaacctggttcatatttatactttgcaatccaaataaagataacccttattccataaaaaaaaaaaaaaaaaa

SEQ ID NO: 302 - DNA, 1642 bp, HUMAN
ctctaaaggttcgggggtggaatccttgggccgctgggcaagcggcgagacctggccagggccagcgagccgaggacagagggcgcacggagggccgggccgcagccccggccgcttgcagaccccgccatggacccgttcctggtgctgctgcactcggtgtcgtccagcctgtcgagcagcgagctgaccgagctcaagttcctatgcctcgggcgcgtgggcaagcgcaagctggagcgcgtgcagagcggcctagacctcttctccatgctgctggagcagaacgacctggagcccgggcacaccgagctcctgcgcgagctgctcgcctccctgcggcgccacgacctgctgcggcgcgtcgacgacttcgaggcgggggcggcggccggggccgcgcctggggaagaagacctgtgtgcagcatttaacgtcatatgtgataatgtggggaaagattggagaaggctggctcgtcagctcaaagtctcagacaccaagatcgacagcatcgaggacagatacccccgcaacctgacagagcgtgtgcgggagtcactgagaatctggaagaacacagagaaggagaacgcaacagtggcccacctggtgggggctctcaggtcctgccagatgaacctggtggctgacctggtacaagaggttcagcaggcccgtgacctccagaacaggagtggggccatgtccccgatgtcatggaactcagacgcatctacctccgaagcgtcctgatgggccgctgctttgcgctggtggaccacaggcatctacacagcctggactttggttctctccaggaaggtagcccagcactgtgaagacccagcaggaagccaggctgagtgagccacagaccacctgcttctgaactcaagctgcgtttattaatgcctctcccgcaccaggccgggcttgggccctgcacagatatttccatttcttcctcactatgacactgagcaagatcttgtctccactaaatgagctcctgcgggagtagttggaaagttggaaccgtgtccagcacagaaggaatctgtgcagatgagcagtcacactgttactccacagcggaggagaccagctcagaggcccaggaatcggagcgaagcagagaggtggagaactgggatttgaacccccgccatccttcaccagagcccatgctcaaccactgtggcgttctgctgcccctgcagttggcagaaaggatgttttgtcccatttccttggaggccaccgggacagacctggacactagggtcaggcggggtgctgtggtggggagaggcatggctggggtgggggtggggagacctggttggccgtggtccagctcttggcccctgtgtgagttgagtctcctctctgagactgctaagtaggggcagtgatggttgccaggacgaattgagataatatctgtgaggtgctgatgagtgattgacacacagcactctctaaatcttccttgtgaggattatgggtcctgcaattctacagtttcttactgttttgtatcaaaatcactatctttctgataacagaattgccaaggcagcgggatctcgtatctttaaaaagcagtcctcttattcctaaggtaatcctattaaaa

SEQ ID NO: 303 - DNA, 895 bp, HUMAN
agagacttaagtctaaggcactgagcgtatcatgttaaagatgagcgggtggcagcgacagagccaaaatcagagctggaacctgaggagagagtgttcaagaaggaagtgtatcttcatacatcaccacacctgaaagcagatgtgcttttccagactgatccaactgcagagatggcagctgagtcattgcctttctcttcggacactgtcagctgggagctggaagcctggtatgaggacctgcaagaggtcctgtcttcagatgaaaatgggggtacctatgtttcacctcctggaaatgaagaggaagaatcaaaaatcttcaccactcttgaccctgcttctctggcttggctgactgaggaggagccagaaccagcagaggtcacaagcacctcccagagccctcactctccagattccagtcagagctccctggctcaggaggaagaggaggaagaccaagggagaaccaggaaacggaaacagagtggtcattccccagcccgggctggaaagcagcgcatgaaggagaaagaacaggagaatgaaaggaaagtggcacagctagctgaagagaatgaacggctcaagcaggaaatcgagcgcctgaccagggaagtagaggcgactcgccgagctctgattgaccgaatggtgaatctgcaccaagcatgaacaattgggagcatcagtcccccacttgggccacactacccacctttcccagaagtggctactgactaccctctcactagtgccaatgatgtgaccctcaatcccacatacgcagggggaaggcttggagtagacaaaaggaaaggtctcagcttgtatatagagattgtacatttatttattactgtccctatctattaaagtgactttctat

SEQ ID NO: 304 - DNA, 304 bp, HUMAN
  misc_feature (1)..(304): N=any base
gtgggcatctacantggnacccacgtcatccctaatgacaggaagatcatctggccaggcggagagacagagaagtctcgagggtaccagatgtccaccagactgaagattgtgacgatccaccaggagcccttcgtgtacgtcaagcccacgctgagtgatgggacatgcaaggaggagttcacagtcaacggcgacccagtcaagaaggtgatctgcaccgggcccaacgacacgtcgccgggcagcccccgccacacggtgcctcagtgttgctacggcttttgcatagacctgctcatca

SEQ ID NO: 305 - DNA, 77 bp, HUMAN
ctactcctagatatttggcatgatcttcagtatgatcttgtgctgtgctatccgcaggaaccgcgagatggtctaga

SEQ ID NO: 306 - DNA, 332 bp, HUMAN
ttcacacgtgacccaggcctctctccggtctcacatgggagttgtgccccaagacactgtcctctttaatgacaccatcgccgacaatatccgttacggccgtgtcacagctgggaatgatgaggtggaggctgctgctcaggctgcaggcatccatgatgccattatggctttccctgaagggtacaggacacaggtgggcgagcggggactgaagctgagcggcggggagaagcagcgcgtcgccattgcccgcaccatcctcaaggctccgggcatcattctgctggatgaggcaacgtcagcgctggatacatctaatgagagggcca

SEQ ID NO: 307 - DNA, 371 bp, HUMAN
ccaggattccatgctactagtgctgactgctgcatctcctacaccccacgaagcatcccgtgttcactcctggagagttactttgaaacgaacagcgagtgctccaagccgggtgtcatcttcctcaccaagaaggggcgacgtttctgtgccaaccccagtgataagcaagttcaggtttgcatgagaatgctgaagctggacacacggatcaagaccaggaagaattgaacttgtcaaggtgaagggacacaagttgccagccaccaactttcttgcctcaactaccttcctgaattatttttttaagaagcatttattcttgtgttctggatttagagcaattcatctaataaacagtttctcactta

SEQ ID NO: 308 - DNA, 508 bp, HUMAN
gctcttcgtctcagtcccagacacgagctggaccacgcaagtatcaaggggctctgcagaaggagctctgagagaaacagctggctcagagggtcctggccccacgaggccacctgtctgtccacagcggccatcatgtttgctgccaacctgactctggggctgtacatccactttggccccaggcctctgagccccaacagcactgcgggcctggaaagcgagtcctggggggacttggcgcaccctggcagcacccgctggctacctcaccctggtgcccctgctggccaccatgctcttcatcatgggctacgccgtgggctggggtcccatcacctggctgctcatgtctgaggtcctgcccctgcgtgcccgtggcgtggcctcagggctctgcgtgctggccagctggctcaccgccttcgtcctcaccaagtccttcctgccagtggtgagcacttcggcctccaggtgcctttcttcttcttcgcggcattgttggtga

SEQ ID NO: 309 - DNA, 215 bp, HUMAN
ctttcacacaaagaaaaagttgtctgtgtgcgcaaatccaaaacagacttgggtgaaatatattgtgcgtctcctcagtaaaaaagtcaagaacatgtaaaaactgtggcttttctggaatggaattggacatagcccaagaacagaaagaaccttgctggggttggaggtttcacttgcacatcatggagggtttagtgcttatctaatttgtg

SEQ ID NO: 310 - DNA, 149 bp, HUMAN
tggaataattttgagagtaatttgaagaattagatgcaaataaatttgaaaacctttaaaaagaaaccaatggcctaactgacccaagaagggaaagaaaatctaaacagactgataaatacaaaatgaaattcagacacttacagagc

SEQ ID NO: 311 - DNA, 252 bp, HUMAN
ggaaaacgccgtcctttgaataacaattctgaaattgcactgtcactaagcagaaataaagtttttgtcttttttgatctgactgtagatgatcagtcagtttatcctaaggcattaagagatgaatacatcatgtcaaaaactcttggaagtggtgcctgtggagaggtaaagctggctttcgagaggaaaacatgtaagaaagtagccataaagatcatcagcaaaaggaagtttgctattggttcagca

SEQ ID NO: 312 - DNA, 554 bp, HUMAN
  misc_feature (1)..(554): N=any base
catatagcagacattccataaaataacattttccaaattaattatgcatacatatacatctgctaattgaatgacactggtagatacatcttcattaagatgtgagttttatgcttgttactgcatattttcaattatgaattaagggcaagaatcaccgtcttcctgtgaatacattcccataatttaagaattccactaagctacattctgtctaccagtttgtaagcaaatgtctctacagacctttcaagtatttatagttggtgcacagtaactccacttattttgtataatgttgctcaaccgaatgtgggatactataattatagcataattattcatagttacagtaaaactctaaaccattttatttagaatatttcagcagtgaacagaacctacatgaaagtgtgccaaaataatttgtgattgtttactgaaatttatgagacttgtaataggctctgtctgaacacatatgaaaaatgtagatagtgatagtttctgtatatgggctggcttacagcttccctacattcatatttntctat

SEQ ID NO: 313 - DNA, 274 bp, HUMAN
gtgatctcatatgattctccaaacttttgagattaattatcttttataaatgaggtaatgagattttaaagagtttagatgacttgcctaactgacaacactgtcagtggcaaagttgggatttgaactcagtctgatgggcaaaaagagttgtcttctaccagccaagttgccataaaagaaaactatgcattgtgcatagttttactcttgttaagtgtaagaatgataaggtaaggctattaacttgctttgtgaacaggctatgttctgg

SEQ ID NO: 314 - DNA, 285 bp, HUMAN
cagggcccaggaatggctgtccaagaggaaggggctggaccgtccactccctgggttcccaaccacccttcccctcctggtcacctttcggcttggcatcaggagggcttgaagaagactcctcagccccacctgcagacctagctagttgccaaccacctggggttgtgcccagtcctcagaactcacctgcccatggtcatccgagccgttcccacaaaagccttccttgggatcctcagccgtctggggggcctccttactggggtcacctcaaaaacagct

SEQ ID NO: 315 - DNA, 249 bp, HUMAN
atgatgcggaggcagggtctgtggaggagcacaagagcgttatcatgcatctcttgtcgcaggttagacttggaatggatcttactaaggtagttcttccaacgtttattcttgaaagaagatctcttttagaaatgtatgcagacttttttgcacatccggacctgtttgtgagcattagtgaccagaaggatcccaaggatcgaatggttcaggttgtgaaatggtacctctcagcctttcatgcgg

SEQ ID NO: 316 - DNA, 311 bp, HUMAN
gtttgccattttctctttcctgatagagtacagctgagacccggacactggttagagggctaggtcgggtgttggccacttggaagataagattaggtttgccatccatgtgagctactactgctatgtcagtaaagcgaattgaaaaagctcgattttttggccgggcaatcttcgccacaaaagcacctaaataagaaattattgatttttttttagaatgaagactttaaatatcaatactttttctgaatgacaagtgtatatcaaatatttacacatttcttggtgccatgcctttcagtgagtca

SEQ ID NO: 317 - DNA, 288 bp, HUMAN
actgaaatacggaatcaagttaaaaaagagatgatccttgccaaacgttttttctttatagtatttactgatgcattatgctggatacccatttttgtagtgaaatttctttcactgcttcaggtagaaataccaggtaccataacctcttgggtagtgatttttattctgcccattaacagtgctttgaacccaattctctatactctgaccacaagaccatttaaagaaatgattcatcggttttggtataactacagacaaagaaaatctatggacagcaaaggt

SEQ ID NO: 318 - DNA, 230 bp, HUMAN
caaagttggagatctgcaacctcacggccgatgctctgcagtctgacaagcttcagacctggacagtgtctgtgaacgagggccgctgggtacggggttgctctgccggaggtcgccgcaacttcccagatactttctggaccaaccctcagtaccgtctgaagctcctggaggaggacgatgaccctgatgactcggaggtgatttgcagcttcctggtggccctgatg

SEQ ID NO: 319 - DNA, 546 bp, HUMAN
  misc_feature (1)..(546): N=any base
tgcagccccaaatctggaggaattatcacgtcttacagcttgaaagtacaggtgaaaatgtcaaacctcaccatcaattganaaacacagtgactgtggataatactgtgggcaacgacactatgtttctagttacgtggcaggccagtggtcctcctgagattatattatttgatcctgatggacgaaaatactacacaaataattttatcaccaatctaacttttcggacagctagtctttggattccaggaacagctaagcctgggcactggacttacaccctgaacaatacccatcattctctgcaagccctgaaagtgacagtgacctctcgcgcctccaactcagctgtgcccccagccactgtggaagcctttgtggaaagagacagcctccattttcctcatcctgtgatgatttatgccaatgtgaaacagggattttatcccattcttaatgccactgtcactgccacagttgagccagagactggagatctgttacgctgagactccttgatgatggagcaggtgctgatgttat

SEQ ID NO: 320 - DNA, 238 bp, HUMAN
ttttaaaatatgaaaagaaactggccaaaatgtgctttttaatgatattcaccttcctggtctgttggatgccttatatcgtgatctgcttcttggtggttaatggtcatggtcacctggtcactccaacaaatctattgtttcgtacctctttgctaaatcgaacactgtatacaatccagtgatttatgtcttcatgatcagaaagtttcgaagatcccttttgcagcttctgtgc

SEQ ID NO: 321 - DNA, 253 bp, HUMAN
gcctcgtttctggctggggtctgctggcgaacggcagaatgcctaccgtgctgcagtgcgtgaacgtgtcggtggtgtctgaggaggtctgcagtaagctctatgacccgctgtaccaccccagcatgttctgcgccggcggagggcaagaccagaaggactcctgcaacggtgactctggggggcccctgatctgcaacgggtacttgcagggccttgtgtctttcggaaaagccccgtgtggccaagttgg

SEQ ID NO: 322 - DNA, 138 bp, HUMAN
  misc_feature (1)..(138): N=any base
gcggggcagagctgtgggctgcttgtcctggnnggagatgaagaaagcaatttccaacctnacaaatccggcagccccaaantaagccgggccagcaagatgaaacagggcaccccagctnccctggtactnaggttg

SEQ ID NO: 323 - DNA, 218 bp, HUMAN
cttctcaaggccacacgactggaaagaggcagaacaaggacttcacccgagtcgtctgtctttttttctgaatgctcgcaacgccctggtggtctccttcgcagccctggttgcgtactccttcgaggtgactggataccagcctttaatcctaacaggggagacagctgaggggctccctccagtccggatcccgcccttctcagtgaccacagcca

SEQ ID NO: 324 - DNA, 229 bp, HUMAN
cccagaggctcatcaggacttgtaaacagcagacagaagagctatgaccactcaaggcaccatcatgggagcagcattgctggaggactggtgaagggggctttgtctgttgctgcctctgcatacaaggccctgtttgctgggccaccagtcactgcacagccaataatttctgaagatcagacagcagccctgatggcccatctctttgaaatgggattctgtgaca

SEQ ID NO: 325 - DNA, 260 bp, HUMAN
gcgctgccgccgccgcgtctgctgaagcctccgagatgccggcgcgtaccgccccagcccgggtgcccacactggccgtcccggccatctcgctgcccgacgatgtccgcaggcggctcaaagatttggaaagagacagcttaacagaaaaggaatgtgtgaaggagaaattgaatctcttgcacgaatttctgcaaacagaaataaagaatcagttatgtgacttggaaaccacattacgtaaagaagaattatccgag

SEQ ID NO: 326 - DNA, 263 bp, HUMAN
ggcacccagagtacaacagacccttgctcgctaacgacctcatgctcatcaagttggacgaatccgtgtccgagtctgacaccatccggagcatcagcattgcttcgcagtgccctaccgcggggaactcttgcctcgtttctggctggggtctgctggcgaacggtgagctcacggggtgactctggggggcccctgatctgcaacgggtacttgcagggccttgtgtctttcggaaaagccccgtgtggccaagttggcgt

SEQ ID NO: 327 - DNA, 335 bp, HUMAN
  misc_feature (1)..(335): N=any base
  misc_feature (1)..(335)
ggcgcctgcggtgggtgagcgcacgcganggcggcgaggcggcacgtgtttctaggtcgtggcgtcgggcttccggagctttggcggcagctaggggaggatggcggagtcttcggataagctctatcgagtcgagtacgccaagagcgggcgcgcctcttgcaagaaatgcagcgagagcatccccaaggactcgctccggatggccatcatggtgcagtcgcccatgtttgatggaaaagtcccacactggtaccacttctcctgcttctggaaggtgggccatccatccggcaccctgacgttgaggtggatgggttctctgagcttcggtg

SEQ ID NO: 328 - DNA, 246 bp, HUMAN
  misc_feature (1)..(246): N=any base
gtgtagcaagaggcagatttttggtgccaaatagatttgaatcctggttctgcttcttcctttgtagagtatgatattggntctttcctcccaaagctattataaagactaaatatgtacacaaatctttggggatgtctgacatataaatgcttaacaataggtatttgctggtattattacaaatgaatttgcttatttttgagccacttctatgtctgtccattaaaccaaaatgtgttctgc

SEQ ID NO: 329 - DNA, 254 bp, HUMAN
cccctccaaaaacccagccaacagaggacaacaagttcaaattctgtttgagctgtgcccgtttggctgagatgaggcaaaaagaaatccccagggtcctggtgcagctcgaggacctggatagccgggtcctctactactcagccaccaagaacggcatcctgtaccgatttggtgatggtgtgtacctgccccctgaggccttcacgttcaacatcaagctgtccagtcccgtgaaacggccacggaaggag

SEQ ID NO: 330 - DNA, 546 bp, HUMAN
  misc_feature (1)..(546): N=any base
gctgggcaatgacatcgcccttatgaagctggccgggccactcacgttcaatgcagaaatgatccagcctgtgtgcctgcccaactctgaagagaacttccccgatggaaaagtgtgctggacgtcaggatggggggccacagaggatggaggtgacgcctcccctgtcctgaaccacgcggccgtccctttgatttccaacaagatctgcaaccacagggacgtgtacggtggcatcatctccccctccatgctctgcgcgggctacctgacgggtggcgtggacagctgccagggggacagcggggggcccctggtgtgtcaagagaggaggctgtggaagttagtgggagcgaccagctttggcatcggctgcgcagaggtgaacaagcctggggtgtacacccgtgtcacctccttcctggactggattcacgagcagatggagagagacctaaaaancttgaagaggaaggggacaagtagccacctgagttcctgaggtgatgaagacagcccgattctcccctggactcccgtgtagga

SEQ ID NO: 331 - DNA, 506 bp, HUMAN
atctggagcacatgaattggataggctgaaaattatattcatagatctgaatataatgatctgaaagtggcagtactatcagaaaaaaaccctgtgaggcttattttggtaatacaatttacttataaaggctgaatcaacaataaaaagttgtggtcttattttaatgaaataaaagcagagaaacaaaaaaatgcatgccctcctacatccctgactatattgaaccataaacattcctatcatgttttaaaatagatattacaaatcctatagagcatgcaattggttttaaaaggctaaagactaaattagaaaactcattagcagaattaaatatgatgttgggattgcccatctcgcctgaccatgctgtgatgtgtcacacgattcagcagagagcagctgggcaagtctagcacttccttgccatggccggggaaggaacatagctgagtagcatgcaggccagtcaaaattcatttaggaacgtgattgtacatgta

SEQ ID NO: 332 - DNA, 502 bp, HUMAN
gtgagttacacttcttcctccccaccaggtgctctctgcagctctggaaaaatggtgtcctctttgttgtcccaccagggggcgccacctccagccccgccccagcctcatacccagttcttcagctcggccagcggtaactgaagcctcccagaatcctggatccgggcccctagtaccctctttcccagggacccaggagtcctgcctccagtcgcctgcacttgtaactgagagctggaggtcgtccatagcagcatagtgagagtgtttttgatgagggtatgcagagtgggggtgaccatgttcccacctggggcctcaggtgggccaaggcctacccactttagccagcgtcccctccagcagccatcagcaagccaacccactccaagccagggccccctttggtccttgcacttgaggtgctttgttcagggctgggtcaggagtggcagagacgatgtccaacaacctcagtactgggggaaaagtagcctgg

SEQ ID NO: 333 - DNA, 405 bp, HUMAN
actgggcataattttcctcattatctacagcctttaccctgaacaatggagtttaatcaccaaaaaaattagatactagggctccagatgataggatggcccaagttatttaacgttttcttgtttaaaaggtgggcccattggcacttaagaaaataaatcagaaaataatatggcttcaagtggacaaataaatatgaatttctaaggaagtcttcgcattatctattggtttcctcttgatttggttccatggataatttctctccaagttctctaataagttctgctaggtcttctgtattctgagatttttcttcaaggagttcatagcggagacttgagatgtcctgcttaatttccttcagttccccttcgttcacttcatcactctccttatctatc

SEQ ID NO: 334 - DNA, 191 bp, HUMAN
attcttcactcctgctccaagggctgggctgtgggtgggatactgggattttgggccactggattttccctaaatttgtcccccctttactctccctctatttttctctccttagactccctcagacctgtaaccagctttgtgtcttttttccttttctctcttttaaaccatgcattataactttgaaa

SEQ ID NO: 335 - DNA, 214 bp, HUMAN
atcgagatcctgcgcgacgacgtggtcgtggccatcctaggaaagaatgacatctttggggaacccgtcagcctccatgcccagccaggcaagtccagtgcagacgtgcgggctctgacctactgcgacctgcacaagatccagcgggcagatctgctggaggtgctggacatgtacccggcctttgcggagagcttctggagtaagctggagg

SEQ ID NO: 336 - DNA, 532 bp, HUMAN
  misc_feature (1)..(532): N=any base
ccggtgtttggactctacacttctttcttccccgtcctcatctacagcttgctaggtactgggagacacctgtccacaggaactttcgccatactcagcctcatgacaggctcggccgtcgagcggctggtgccggancccctcgtggggaatctgagcggaatcgagaaggagcagctggacgctcaacgggttggggtagccgcggccgtggccttcgggagcggggcgttgatgctggggatgttcgtgctgcagctcggcgtcttgtccacctttttgtccgagcctgtggtcaaggcgctgaccagcggggccgcgctgcacgtgctcttgtcccagctgccgagcctcttggggttgtccctcccgcgccagatcggctgcttctctctcttcaanacgctggcctccttgctgactacgctgcctcggancagtccggccgaactgaccatctccgcgctcagcctggcgctgctcgtgccggtaaagggaattgaacgtgagattccgagaccggctaacccac

SEQ ID NO: 337 - DNA, 452 bp, HUMAN
  misc_feature (1)..(452): N=any base
acagatcctaagccgcccccgcccgcctgctcggacagtttccgttccctcctagtctctgttcgctcgcttaagctgttttgaagccaagtgaagagtgtggtttgcatccaagagaaaacaccacactgtgatgtcatcgggaaatgatctcccaagtcgctgccagacaccacccactgcttcgccggacaatgtcgaagtccagtctgtgccggggaaggcactggttaggaaggatgttcaaacggtcccacccaagcctgtcacctctgctcatcctccaagaccacccagctttctcccagccacagccaagattcccaaagtcaaggcccaaagatttccaaggttcccaaagtcaaggccaggccaaggcctggttgggtccttggggcgggcaagggcggnctcttcctctgctgagaatccccacttggtgtaaggggaga

SEQ ID NO: 338 - DNA, 349 bp, HUMAN
  misc_feature (1)..(349): N=any base
ctttttttgaggtttggatgttgcagctagtaaaggatatttttgctctgttcagcagttctaaaaattgctgaagtaggggccaggtcactggtagttatagtatggaatgggagaagtgaaagttcagttatagaactttccatacttccaagtttactgcaagtttttatgcttgagagagatgctttctaatataagactgatgtgttgattttactgattgtactgtacatctattaaagccttagattattacattacgggttggaacccataccaatgtaatttcaatcgtgttaagaaagtaatngtgacttcacatgttattgtagttagttacattata

SEQ ID NO: 339 - DNA, 261 bp, HUMAN
atttgaaaaaatgtatttaaaagtccaacaactttttaatataaattacgactctcaaacccattcccatcactttattagtgatggtagcatacatattagagaaggtagctaaaggcaagagagcaccaaaggaaaaagactgtccaaagaacaggtattagaatgaggccgaagatcacggtgaccagagatttctaggagtctctaacctttccaccctatcctgttaaccctttagatctctagtataacactcag

SEQ ID NO: 340 - DNA, 224 bp, HUMAN
  misc_feature (1)..(224): N=any base
tgtacatctattaaagccttagattattacattacgggttggaacccataccaatgtaatttcaatcgtgttaagaaagtaatggtgacttcacatgttattgtagttagttacattatagaatattacttattttctttgttaaaatgtagtttttcatttcctacatttattagattttcattttctattaacaattgaataccatttcatnttatagactt

SEQ ID NO: 341 - DNA, 479 bp, HUMAN
  misc_feature (1)..(479): N=any base
tgcaaatatgtagtccaaaacaacaaaaaaagaaaatgtcttatgtgacttagcacgaacagtttccacagcctttcacactattgacaatttcttcttgtagtttctttctttcctcctctttggatatattttctttctttgcttcccatttggggttatcatggttctgcacacggctgctctgtgtatgccacatttctgaatagatactatgagggttagcaagcaaaccatggtgggtaccacgttcggctaccttaccctgatccaagacaatgatttcatctgcatcaaccactgttgacaatctgtgtgcaatgaaaatagaagttctgtgtttgaccacatccttcatggcaccaagaatagtctcttcagtaatcgaatctaacgatgaagtagcttcatcatagagtatgactgggggggccttcaaaatggntcttgcaattgctaactctttggcttttctcctc

SEQ ID NO: 342 - DNA, 246 bp, HUMAN
gttataactaatctgcctgaagacttctcatgatggaaaatcagccaaggactaagcttccatagaaatacactttgtatctggacctcaaaattatgggaacatttacttaaacggatgatcatagctgaaaataatgatactgtcaatttgagatagcagaagtttcacacatcaaagtaaaagatttgcatatcattatactaaatgcaaatgagtcgcttaacccttgacaaggtcaaagaa

SEQ ID NO: 343 - DNA, 447 bp, HUMAN
ggagctgttcctgaaggttgccggcctgggccctgtggagtacttgtcttccggatggaacttgtttgacttctccgtgacagtgttcgccttcctgggactgctggcgctggccctcaacatggagcccttctatttcatcgtggtcctgcgccccctccagctgctgaggttgtttaagttgaaggagcgctaccgcaacgtgctggacaccatgttcgagctgctgccccggatggccagcctgggcctcaccctgctcatcttttactactccttcgccatcgtgggcatggagttcttctgcgggatcgtcttccccaactgctgcaacacgagtacagtggcagatgcctaccgctggcgcaaccacaccgtgggcaacaggaccgtggtggaagaaggtactattatctcaataattttgacaacatcctcaacagcttt

SEQ ID NO: 344 - DNA, 97 bp, HUMAN
agctgcctgagccagccagtgacagcgtttcctcagggcacttggattggtgaagacatattccctcctctgctgcctcccactgtaatcaggacct

SEQ ID NO: 345 - DNA, 210 bp, HUMAN
cacagatgaaggacgtgttcttcttcctcttcttcctcggcgtgtggctggtagcctatggcgtggccacggaggggctcctgaggccacgggacagtgacttcccaagtatcctgcgccgcgtcttctaccgtccctacctgcagatcttcgggcagattccccaggaggacatggacgtggccctcatggagcacagcaactgctcgt

SEQ ID NO: 346 - DNA, 437 bp, HUMAN
atgagaacggctacaacttcaagtccgacatctggtccttgggctgtctgctgtacgagatggcagccctccagagccccttctatggagataagatgaatctcttctccctgtgccagaagatcgagcagtgtgactaccccccactccccggggagcactactccgagaagttacgagaactggtcagcatgtgcatctgccctgacccccaccagagacctgacatcggatacgtgcaccaggtggccaagcagatgcacatctggatgtccagcacctgagcgtggatgcaccgtgccttatcaaagccagcaccactttgccttacttgagtcgtcttctcttcgagtggccacctggtagcctagaacagctaagaccacagggttcagcaggttccccaaaaagctgcccagccttacagcagatgctga

SEQ ID NO: 347 - DNA, 134 bp, HUMAN
ccgctgacagaggagctggtgttccgggcctgtatgctgcccatgttagcaccgtgcatgggcctgggcctgctgtgttcacctgcccgctcttttttggagttgcccattttcaccatattattgagcagctg

SEQ ID NO: 348 - DNA, 239 bp, HUMAN
gtcaaggagaagtccataaggatcatcatcacgctgctggtgcaggtgctcgtctgctttatgcccttccacatctgtttcgctttcctgatgctgggaacgggggagaacagttacaatccctggggagcctttaccaccttcctcatgaacctcagcacgtgtctggatgtgattctctactacatcgtttcaaaacaatttcaggctcgagtcattagtgtcatgctataccgtaa

SEQ ID NO: 349 - DNA, 472 bp, HUMAN
cagaggcttggaggggatgtgcagagccccaactgcccatctgaggatgtagtcatcactccagaaagctttggaagagattcatccctcacatgcctggctgggaatgtcagtgcatgtgacgcccctattctctcctcttccaggtccctagactgcagggagagtggcaagaatgggcctcatgtgtaccaggacctcctgcttagccttgggactacaaacagcacgctgccccctccattttctctccaatctggaatcctgacattgaacccagttgctcagggtcagcccattcttacttccctgggatcaaatcaagaagaagcatatgtcaccatgtccagcttctaccaaaaccagtgaagtgtaagaaaaccccagaactgaacttaccgtgagcgaccaaagatgatttaaaaagggaagtctagagttcctagtctccctaacagcaccagagaagaca

SEQ ID NO: 350 - DNA, 288 bp, HUMAN
gctcgcgtcgcatttggccgcctccctaccgctccaagcccagccctcagccatggcatgccccctggatcaggccattggcctcctcgtggccatcttccacaagtactccggcagggagggtgacaagcacaccctgagcaagaaggagctgaaggagctgatccagaaggagctcaccattggctcgaagctgcaggatgctgaaattgcaaggctgatggaagacttggaccggaacaaggaccaggaggtgaacttccaggagtatgtcaccttcctgggggc

SEQ ID NO: 351 - DNA, 384 bp, HUMAN
  misc_feature (1)..(384): N=any base
tttggtcaagttgtttccattaaaaagtactgattttaaaaactaataacttaaaactgccacacgcaaaaaagaaaaccaaagtggtccacaaaacattctcctttccttctgaaggttttacgatgcattgttatcattaaccagtcttttactactaaacttaaatggccaattgaaacaaacagttctgagaccgttcttccaccactgattaagagnggggnggcaggcantaggganaanagtcanttngccttcnnagcnttctgggcagacntggcgaccncnncagcncnagcagccntctcgtccacggctntgtntgacacccaccgcaacggncngnctctatancacgaacagcaaagcgacccaaaggng

SEQ ID NO: 352 - DNA, 256 bp, HUMAN
  misc_feature (1)..(256): N=any base
gggtgaaggtggcttcgggggtcgtggtggaggcagaggcggctttggaggacgaggtggtggtagaggaggccgaggaggatttggtggcagaggccggggaggctttggagggcgaggaggcttccnnnnnnnnnnnnnnnnnnnnnnnnaccacaagccacaaggaaagaagacgaagtttgaatagcttctgtccctctgctttcccttttccatttgaaagaaaggactctggggtttttactgttacctg

SEQ ID NO: 353 - DNA, 298 bp, HUMAN
cttctttatggcgtcgctcctgtgctgtgggccgaagctggccgcctgcggcatcgtcctcagcgcctggggagtgatcatgttgataatgctcggaatatttttcaatgtccattccgctgtgttgattgatgacgttcccttcacggagaaagattttgagaatggcccccagaacatatacaacctttacgagctagtcagctacaactgtttcatcgctgcaggcctttacctcctcctcggaggcttctctttctgccaagttcggctcaataagcgcaaggaatacatggtg

SEQ ID NO: 354 - DNA, 540 bp, HUMAN
gaggaacagcgccatgtgctccgggctcctggagctcctgctgcccatctggctctcctggaccctggggacccgaggctctgagccccgcagtgtgaacgatcccgggaacatgtcctttgtgaaggagacggtggacaagctgttgaaaggctacgacattcgcctaagacccgacttcgggggtcccccggtctgcgtggggatgaacatcgacatcgccagcatcgacatggtttccgaagtcaacatgagattctggctgcaggaaaggggaacgaagacagtggtctgtgcgttccaggggtgtctctgcggtttttccaaggctgcctcctggactgggagacccgggcccggcaccgccagtctctgtccgaggtgctgacaggcttccgctgcttcagagagcgggaggccgcgcctaggcgggctctcagaggagccgctctaccgggagagtcggaggctggtgacccagtgtcacttaggtcttctgtgaatgcagactggattcaatattctgacctgtgggaagcg

SEQ ID NO: 355 - DNA, 508 bp, HUMAN
  misc_feature (1)..(508): N=any base
aagaggaccaatgaaaagggtgccttctggggcctgatctcgggcctgctcctgggcttggttaggctggtcctggactttatttacgtgcagcctcgatgcgaccagccagatgagcgcccggtcctggtgaagagcattcactacctctacttctccatgatcctgtccacggtcaccctcatcactgtctccaccgtgagctggttcacagagccaccctccaaggagatggtcagccacctgacctggtttactcgtcacgaccccgtggtccagaaggaacaagcaccaccagcagctcccttgtctcttaccctctctcagaacgggatgccagaggcnnnnnnnnnnnnnnnngtccagttcgagatggttcaagaaaacacgtctaaaanccacagctgtgacatgaccccaaagcagtccaaagtgtgaangccatctgtggntctgtggaatacaggagaagggcaaagnagagctcccggcnagagcagaagcnatc

SEQ ID NO: 356 - DNA, 553 bp, HUMAN
  misc_feature (1)..(553): N=any base
ttcaggagtgggcgaantctatgagtttgttcacagttttcaggatgagaagcgtcantggncttaccaggttttgggcctctcagaaggggcaacaaatgaagaaatacatcggagttaccaggagctagtgaaggtctggcacccagaccacaacctggaccagacagaggaggcacagaggcacttcctggagatccaggctgcgtatgaagtcctgagtcaacccaggaagccctggggatcccggaggtgaaaagaaacttccccctgaggactgactcttcctagcagagctgggcaacttgtcccaaatctagctttgcccacgaatggcatcccaacagagttaaagaaactgcttgcaggggctgggcgtggtnnnnnnnnnnnnnnnnnnnnnnnnnnnnnnnnnnnnnnnnnnnnnnnnnnnnnnnnnnnnnnnnnnnnnnnnnnnnnnnnnnnnnnnnnnnnnnnnnnnnnnnntggatatattttaatttactcaaatgggaactactgataagcagttcttatttttccagcataagca

SEQ ID NO: 357 - DNA, 574 bp, HUMAN
  misc_feature (1)..(574): N=any base
tgctataagcaaaaacatccaattgggtgatgagaagggcttaaaattcccctctgtttgggactggtctctccagtttacagcaaaggatcgcacccttttccataaccccttctacattggaaagagcacaccttgtatacagaatggctccgtgaagtcttttaaacggacaaaggtaaatcacagctaacaaaacgtgatgttggctcacacgtaaccaaacacctctttttcagaacagagagcgttaaaagtaaaggcagttccaagagtaacactgctaatgtgggtttctgaggggtcattccctttttaactcaaatgactgtatcccaactttcttcctggtgtctgaggcccacaaagtctcagtacctgagagtgggcagattgcagctttgagcctgcaagcctgatttactaaagccccatttatccatttcttgatgattcaagccgccactgtggcagggaatgccgcctggctgtgatgtagtcatggcctcctgactgctatantcttgtcctaataacattcattggttgnccttttaataantccccaataaat

SEQ ID NO: 358 - DNA, 261 bp, HUMAN
gcccctgcctgcctgcctcaacccactgctgtacctgctcttcaacccccacttccgggatgaccttcggcggcttcggccccgcgcaggggactcagggcccctagcctatgctgcggccggggagctggagaagagctcctgtgattctacccaggccctggtagccttctctgatgtggatctcattctggaagcttctgaagctgggcggccccctgggctggagacctatggcttcccctcagtgaccctcatctc

SEQ ID NO: 359 - DNA, 201 bp, HUMAN
taaacatcccaaaactggagttttcgaagagaaacatgccaaacctccagatgtagaccttaaaaagttctttacagacaggaagactcatctttatacccttgtgatgaatccagatgacacatttgaggtgttagttgatcaaacagttgtaaacaaaggaagcctcctagaggatgtggttcctcctatcaaacctcc

SEQ ID NO: 360 - DNA, 286 bp, HUMAN
ccgccgccgacgccgcttgtgggcccgactccgctctgtctgcttcgccaccttctccccgagcactgcccggccggccgccatggctaacgtggctgacacgaagctgtacgacatcctgggcgtcccgcccggcgccagcgagaacgagctgaagaaggcatacagaaagttagccaaggaatatcatcctgataagaatccaaatgcaggagacaaatttaaagaaataagttttgcatatgaagtactatcaaatcctgagaagcgtgagttatatgacaga

SEQ ID NO: 361 - DNA, 288 bp, HUMAN
tggcgtggcctcagggctctgcgtgctggccagctggctcaccgccttcgtcctcaccaagtccttcctgccagtggttagcaccttcggcctccaggtgcctttcttcttcttcgcggccatctgcttggtgagcctggtgttcacaggctgctgtgtgcccgagaccaagggacggtccctggagcagatcgagtccttcttccgcacggggagaaggtccttcttgcgctaggtcaaggtccccgcctggagggggccaaacccccagtggctgggcctctgtgt

SEQ ID NO: 362 - DNA, 175 bp, HUMAN
atcacacacgaagagagccatcttccagaaataagtttatacactctctcctctaattgcatcaggactttaccagataatgttcttccagatctgaaaaggaaaatgcctaaaagagcttccaaactcatttttgaataatactaggctacaaagaattacactgtgaattcat

SEQ ID NO: 363 - DNA, 271 bp, HUMAN
aggcttgacaccaagcacgtgcctgcctcgtcaggctacaacttcaggtttgccaaatactacaagatcaatggcaccaccacccgcacgctcatcaaggcctacgggatccgcattgacgtcattgtgcatggacaggccgggaagttcagcctgattcccaccattattaatctggccacagctctgacttccgtcggggtggtaaggaaccctctctggggtcccagcgggtgcggggggtccaccaggcccttacacaccggtctct

SEQ ID NO: 364 - DNA, 234 bp, HUMAN
ctgtcaccaggagagcacgccaaggacgaatatgtgctatactattactccaatctcagtgtgcctattgggcgcttccagaaccgcgtacacttgatgggggacaacttatgcaatgatggctctctcctgctccaagatgtgcaagaggctgaccagggaacctatatctgtgaaatccgcctcaaaggggagagccaggtgttcaagaaggcggtggtactgcatgtgctt

SEQ ID NO: 365 - DNA, 447 bp, HUMAN
  misc_feature (1)..(447): N=any base
angnncnggacatgnanctganagntannnnaanggggtnnaaggantgnncaaatncngacnctagcagggatgtgnncactgtcanggggccagnataactgnggntgttgaagancctcttttcctcagtntggntcttctgccancagtcagatgcanggangcccggtgcagaagcaccaggcactaataatcaggagaggcatggctagattccactcacttccaacatttncttctggtctcttttcttagggactcacccctttggttgggaacattctccagcagtacagccacagangggccagagatgccagaagcagcagaatccagacacccaagagcatggcctgaagggttctgaacaaggccttcagcatgtcccatgaaggaagtacataggtgtaagcttctgactttcttctggactcttgagtgggg

SEQ ID NO: 366 - DNA, 305 bp, HUMAN
cgcagccgcccgccgcccgcgccgccatgggagtggagggctgcaccaagtgcatcaagtacctgctcttcgtcttcaatttcgtcttctggctggctggaggcgtgatcctgggtgtggccctgtggctccgccatgacccgcagaccaccaacctcctgtatctggagctgggagacaagcccgcgcccaacaccttctatgtaggcatctacatcctcatcgctgtgggcgctgtcatgatgttcgttggcttcctgggctgctacggggccatccaggaatcccagtgcctgctggggacg

SEQ ID NO: 367 - DNA, 625 bp, HUMAN
  misc_feature (1)..(625): N=any base
ctggaagacttagacaatgctaaggaaaaatttaatgatggaaatatcgacaaatattcaacatcatttaaaaacaaagtagcttctcttatttcacatagcttagtttgggatagaaatagaactaatgtttacaatgattcttacatttagcattaatcagaaacgagggtttgttaagtgcccttgctgnnnnnnnnnnnnnnnnnnnnnnnnnnnnnnnnnnnnnnnnnnnnnnnnnnnnnnnnnnnnnnnnnnnnnnnnnnnnnnnnnnnnnnnnnnnnnnnnnnnnnnnnnngtttgagaaccgctggattgattctttgacagtttttgaagtccgctgctcaccatatcacttcatcctcttataaactttcactatgtgattgcctaagagcccctgcttgttggctgctccacattttcacacagttgtactatttctttctgaaatgacattgtttgagggacagtgggtggaacgtgtgagctcctcactgaaggctgcctccagaattccctgaatggactgccttgctttcttcctaaaatctttccccaagagggcataaaggaagggattaaagcaactattggcagatgctagagcaatgcatacatg

SEQ ID NO: 368 - DNA, 611 bp, HUMAN
  misc_feature (1)..(611): N=any base
caatgctaaggaaaaatttaatgatggaaatatcgacaaatattcaacatcatttaaaaacaaagtagcttctcttatttcacatagcttagtttgggatagaaatagaactaatgtttacaatgattcttacatttagcattaatcagaaacgagggtttgttaagtgcccttgctgnnnnnnnnnnnnnnnnnnnnnnnnnnnnnnnnnnnnnnnnnnnnnnnnnnnnnnnnnnnnnnnnnnnnnnnnnnnnnnnnnnnnnnnnnnnnnnnnnnnnnnnnnngtttgagaaccgctggattgattctttgacagtttttgaagtccgctgctcaccatatcacttcatcctcttataaactttcactatgtgattgcctaagagcccctgcttgttggctgctccacattttcacacagttgtactatttctttctgaaatgacattgtttgagggacagtgggtggaacgtgtgagctcctcactgaaggctgcctccagaattccctgaatggactgccttgctttcttcctaaaatctttccccaagagggcataaaggaagggattaaaggcaactattggcagatgctaggagcaatgcataca

SEQ ID NO: 369 - DNA, 240 bp, HUMAN
gtggtcgggggagcggccggagaggagctgccgggagttcgtgccctgcaggacatgacaccagtggcatatcacggccatggggtctcagcattccgctgctgctcgcccctcctcctgcaggcgaaagcaagaagatgacagggacggtttgctggctgaacgagagcaggaagaagccattgctcagtacccatatgtggaattcaccgggagagatagcatcacctgtctcacgtg

SEQ ID NO: 370 - DNA, 215 bp, HUMAN
ggctgcttcctagaaggtcgtgtcacgtggaacctcttaatctcagcatccggagctccaggaagggaaaatttcaagtcagatagaattctatatataccatttctttggaaccttcagccctcaagattccaacatcatgacctcagtttcaacacagttgtccttagtcctcatgtcactgcttttggtgctgcctgttgtggaagcagtag

SEQ ID NO: 371 - DNA, 116 bp, HUMAN
aaagttttggcaggagcgggagaattctgcggagctgcgggacggcggcggtggcgccgtaggagccgggacagtgttgtacagtgttttgggcatgcacgtgatactcacacagt

SEQ ID NO: 372 - DNA, 225 bp, HUMAN
gagaaccagagtgtcagagcaaaacctcctctatctgcacatcctggggacgaaccgggcagccggagagctgcggccggcccagtcccgatccggctttgaagggtaaaacccaaggcggggccttggttctggcagaagggacgctatgaccgcagaattcctctccctgctttgcctcgggctgtgtctgggctacgaagatgagaaaaagaatgagaaacc

SEQ ID NO: 373 - DNA, 505 bp, HUMAN
  misc_feature (1)..(505): N=any base
gtcagtgcatgtgacgcccctattctctcctcttccaggtccctagactgcagggagagtggcaagaatgggcctcatgtgtaccaggacctcctgcttagccttgggactacaaacagcacgctgccccctccattttctctccaatctggaatcctgacattgaacccagttgctcagggtcagcccattcttacttccctgggatcaaatcaagaagaagcatatgtcaccatgtccagcttctaccaaaaccagtgaagtgtaagaaacccagactgaacttaccgtgagcgacaaagatgatttaaaagggaagtctagagttcctagtctccctcacagcacagagaagacaaaattagcaaaaccccactacacagtctgcaagattctgaaacattgctttgaccactcttcctgagttcagtggcactcaacatgagtcaagagcatcctgcttctaacatgtggatttggtcacaaggnttaaggtgacccaatg

SEQ ID NO: 374 - DNA, 250 bp, HUMAN
gcgactatatggatgaggtgacatatggggagctggagaaggaggaagctcagcccattgtcactaagtacaaggaggtggcagaggtggtggcagaggcggtggttttagaggtggaagaggaggtggaggtgggggcttcagaggaggaagaggtggtggtttcagagggagaggacattaagtgaaacagttgacagacatcaccagttgacttctgcattaacctgcatgatctgtttctactatg

SEQ ID NO: 375 - DNA, 242 bp, HUMAN
atttgtttagagtatctatagcaaaataggttacatgtagtttgaaataaggtatcctgagttactttggcaacaagttcttttacccttacccgtggtatttgaaaaaaatcaaggtaactgtctgaatactttaatatcagcttgttttgtgaattctctgaatactgtcaacactcttatctaagtttgcctttatgatgcagtggcagcattttgaattacttttcaaagaatactgt

SEQ ID NO: 376 - DNA, 286 bp, HUMAN
cagagaggtcgtggaggtggatctggcaattttatgggtcgcggagggaactttggaggtggtggaggtaattttggccgtggtggaaactttggtggaagaggaggctatggtggtggaggtggtggcagcagaggtagttatggaggaggtgatggtggatataatggatttggaggtgatggtggcaactatggcggtggtcctggttatagtagtagagggggctatggtggtggtggaccaggatatggaaaccaaggtggtggatatggtggaggtggag

SEQ ID NO: 377 - DNA, 627 bp, HUMAN
  misc_feature (1)..(627): N=any base
tttatcaaataaaactatgaaaatgcaagtgggctcctatgccagaaaaacccacctggcgttccagatgcaagagggccagagcagaggcctggttctggggaagcctcaggatgctgcccaccaaggagtgatttccaaagagtaatccagggtgcccttttcccttctggggaagtgtggagaggtagagccccagaggagaatgtaaacaagcagccagcacctctgtataggcccggcctggatcagagagaggggagaactctgcagggtgtgggattgggctcagggacctccgagtgaggcagggactccctgctggctgctctgcagcagctgctggaacagggagtggggctggttgcgcagggtggccggggagtccagctctaccactctccccgcttgtagcaccagcacccggtctgagttcaggatcgtgttgagcctatgggcaatggtcagcactgtcttgttggcaaagcgtttgcagatggtctgctggagcagctggtctgtcttctggtccacacttgctgtggccttcatcgatacacaggatcttggcatctgtgaagagaancctggccaaacacaacagctgcctctgccccaagaagataa

SEQ ID NO: 378 - DNA, 170 bp, HUMAN
ttccgggaagttcaatagtggtgagttggtggccattatgggtccttccggggccgggaagtccacgctgatgaacatcctggctggatacagggagacgggcatgaagggggccgtcctcatcaacggcctgccccgggacctgcgctgcttccggaaggtgtcctgct

SEQ ID NO: 379 - DNA, 290 bp, HUMAN
gctgcaccgtgagcgccgaggacaaggcggcggccgagcgctctaagatgatcgacaagaacctgcgggaggacggagagaaggcggcgcgggaggtgaagttgctgctgttgggtgctggggagtcagggaagagcaccatcgtcaagcaggtgtaggtcattcccgggggttgcttattccgggggggattcccgcagtacgcgcggttgtctacagcaacaacatccagtccatcatggccattgtcaaagccatgggcaacctgcagatcgactttgccgacccct

SEQ ID NO: 380 - DNA, 400 bp, HUMAN
  misc_feature (1)..(400): N=any base
agcctctgnagggtaaacttttatttcttggcctgnacaggnacttccacacccatgcctcctcctgggcaccttttactctgcccaagcagtggcagncccagttccaaaaggtgcctgccatggnccaaaggggttggggagtcacttcacattccaggttggaggagtgagaggacttgggggtactcctcccaccccattgccagcaagaggccatgactcacctcaaccccaagtcctgcatcctgggtgggaagtgacaatgcctcctcccagctntccatacctaatggggtcatgaccagacagggtaggacccaggcccccagcttcagttggtaacggtggcctccacggctgccccctgtccaggtgacaaccccagcccccatgatgg

SEQ ID NO: 381 - DNA, 407 bp, HUMAN
  misc_feature (1)..(407): N=any base
atagagaacccacagttcagttttattcagagcaaagaaaaaagaaactttccatcatactagaagaaacttggccgtaagtttgggatctgtgctcaaactacacatgcaatgaggacaatattctgctaatacaattgacttgctgctgcatttgtctactgtttgtctaatattaacaattataaacagagcagtgcaactagtatttggaacaatccttacagtgttacagtgtcaggcacaacatttcacttctcttcacaccactggttctctttgcgtacctgggcttcctcctcttcagtaaagtcatttttgatattgaaggtcttgcgaatctcctcaggagttttccccttgatcatattggcaacagtcttgcatgtaacatcaagcaaaccttn

SEQ ID NO: 382 - DNA, 456 bp, HUMAN
  misc_feature (1)..(456): N=any base
gtagtcagctatttaattaggttcttaagacatttagaacaccaatttgtgaggataaattccattcgtcagagcaaacacagatcgcaggtagccctggagctgaggaatagctttgatttttggtaaaatttgtgagtccacagctttctgatcaatcttgcgctgctccgtaatctcatatttctctttttctgtgtcgaagatctcaccttcctggtgtctgggcttccgcagcttcttcttcttgaagtaagcatcagtaagatgttttgggatttttacattgctgatatcgattttggttgaagtggcaatgacaaatttctggtgtgttcttcgtagaggaactcgattgaggaccagaggcgntncaacaagtaataagccactagccagctgcttcaggaaaaccaccctcttgcccctgtggcgtccagtgaggatgatcagaat

SEQ ID NO: 383 - DNA, 554 bp, HUMAN
  misc_feature (1)..(554): N=any base
taatactaagggaaaaggctgttcttttatttatttatttttcctgagtcctcacgtttttcttctctgacaaatgtttgaaattcagtgaaataccaaaggagtcaaggatgaaggggacacaggatggaatcagaaaaaacataaatggaatccaggcagttctatgagacaacactgatatatctccttgataaagaaaaaatgtacagaatatttaatgagtctgtcttgccccaaaagggaaaaacacaagtagctaagccatttgcagagaggaaaaatgtcatggaaaaatgaaaaatctctcctaatgtctatagcacatgaaatatctaagtaggtgggtgcagtggttcatgcctggtattgggagaccaaggcaggcagatcacttgacgtcaggagttcaagaccagcctggcccaatggngaaaccccgtctcctattaaaaataccaaatttagctgggcatggtggtgggtgccctgtaaccccancacttaggaagcntaggccgggagaatccatgttgacccccggaggcggaggt

SEQ ID NO: 384 - DNA, 519 bp, HUMAN
ttttttacatttctcaacttttattgtgggcccttcaaccatttttgctgctgggtttcatattttcggattgtttcacggatccacaggacgtatcttgagacacgggtgtagacaccaggccggtcaggttgcccacatgggaagtctccccaggagagaatgccatacagtgttctgttacagaccagggggcccccagagtcaccctcacaggagtctttgccaccctcttttgtgccggcacacaacatgttgtcagtgatctttcctgggtagacttgacgacactcctcatctgagcgaagttggatgttggcacaattgtagagttttggggtaattcactcagaccttccctcccatctctgcccctgtttccccagccactcctatggggcctcaggcacctgtgtgggtgcatacctgggggctggtggtggtgcccagccagacacccgacagtggtgccaggggttaggcggttgttgtgggaaaggggcagggtttggatgtagc

SEQ ID NO: 385 - DNA, 596 bp, HUMAN
catacttaattttttattttgaaattccctattccctctatacaagaacctttgctgaaacagtttccacaaaggcagcagtgaattttcagaacatttacattttttccccctcagcaaaaagataaatcacagtgtaaattatgttgttctgctgtcatctttggctggggttagacccagaagttggtgactagcaaaccaatatagccaaatgttgctagtgctccttaggcctttaagctataaactcagcaaggaatgtctgcattttatctctttaaggtaccaccaggggggtatgacagcattaacttccataaacttttatagacaaatggaaaaaaatctacaaaatttgctagtaatattacacagcaatacacactttttatactctacacaaaaccaaaattcttggtcttaatggcgagtaacaatttctgtttgagaatctgtttagaggaatagagtgggacgtaaagtcgagaaatgcaagtatttgcagtaggaagatgttggtcatctggtggtcttattgtgattgagggcataggctggaatccttcttcactggctggcagtgatgggcttgt

SEQ ID NO: 386 - DNA, 358 bp, HUMAN
ttcgtgcagagccagatactttattcatcacttgggcgatttgaaactgccaactccgtccctccctcccccacccttgattctagagtgacataagaatggtgataagtctgaactctttcacctcttaaatgccatatcattgcccacagttgccaaatacaaaatatcaagtcctctgctgaagaagactgaggtcccatcgtttcctgtgttgcaggtcacttcttcaccaggtggctgactgcatcattgtgaggcagagcatgctgtgcaagtgtcataagtcatcccactttcaactctcaggaacactcgcagccagtaccacgctgtcctcgccatccaatattgatag

SEQ ID NO: 387 - DNA, 457 bp, HUMAN
ttttagtcataaaaccgattatttaattgaagctataaaaaaggtagtataagtgataaaataattaggaaagaatatttagcatgtttcaaaacatttaaaataggagcagaacattttacaaaaagttgtacaggaaattaaattcttaaactatcagtacaaacatgacattacagagtatcttgggaagtacgggtccggatcggaaaggactatgatgctttaagtctgaaaactattggccaaatatttaggtttagatttacagttcctgggtatgagaatcatattactatatacatctcccaaaccagtaggtagtattttccaattaaccatgtgtggtatcatcttctacaaagtctttggccatctctgctgtgatcacatcaatatgactagccttatttctggactttacaccataggatttggcagctgactcaagcagttc

SEQ ID NO: 388 - DNA, 441 bp, HUMAN
cgagtctcagaaaataccaggaatgactctatccagttctgtttgtcaagtaaactgttgtgccagagaaacttcacttgcggagaacatttggcaggaacaacctcattctaaaggtcccagtgtacctttctccatttttgatgagtttcttctttcagaaaagaagaacaaaagtcctcctgcagatcccccacgagttttagctcaacgaagaccccttgcagttctcaaaacctcagaaagcatcacctcaaatgaagatgtgtctccagatgtttgtgatgaatttacaggaattgaacccttgagcgaggatgccattatcacaggcttcagaaatgtaacaatttgtcctaacccagaagacacttgtgactttgccagagcagctcgttttgcatccactccttttcatgagataatgtccttgaaggatct

SEQ ID NO: 389 - DNA, 388 bp, HUMAN
gaccagacaggattaaattttattgaattacagttacaagtggaaaaaatgactgacttactgcatggagaagtattatgtcaacctgttaaaagctatagaaattaaaatgttcatgtatatacaaaatataaatgacatgtaaggtaaaattacagtgatcaatttacaacaaagaaattaacagtagttttccagcttgtttgattaatcaagcaggtttactcttgaatccatagcgtttctacaatttaatttggacaaagttctattccagatcagccaggttttaaaactgaaatgtgttaagggtggattgttagcttccccaggattggtgtggatgataaatactttttttaaaaattaattattattgtttataaga

SEQ ID NO: 390 - DNA, 597 bp, HUMAN
gccgacagagcaagactctgtctcaaaaaaaaaaaaaaatacaattaagaggtgtatactgatgattcttcccactcatttgtttgtccagaagtaaataaatgtcggaagttttccaagtaactatttgttttttggggggttttttagttagagtcttggtctgtcacccaggctggagtacagtggcaggatctcagcttgctgcagcttccatctcccaggttcaagcgatcatgtgcctaagcctcctgagtagctgggatcacgggtgtgtaccaccacgcccagctgatttttgtatttttagtaaagactttcgccatgttgtccaggctggtctcgaactcctggcctaatgatctgcccgcctctgcctcccaaagtgctgggatcacaggcatgagcaccggaaccaagctttatccgcttaaatttaacgtgttttttgacttcttaattaacttggtcatataccaaatgtgatctctgtggattaccacatgcattaaaaaatttttcaagctgggcccagtggcgcacgctgcaatcccacactttgggaggccagagagggagattgctgagcccagagtt

SEQ ID NO: 391 - DNA, 460 bp, HUMAN
ccacagagtaataataaactcattcaacattataaaaatacttttccaactacttttacatgacttaatgtttccaattatttgcgaaaccatgtccccgcaggtcttagctggtccttgtttaagattcttaatttcattttggcaatatctaaatttttatttacatacatgtgtactaaagcattacctatttttatggttaaaacatgaactttagctgggcatggtggctcacatctgtaatcccagcactttcagagatcaaagcgggaagactgcttgaggccaggagatcaagaccagtctgggcaacatagtgagacctcatcgctacaaaaaatcttaacaattagctggatgcagtggcacatgcctgtagtcccagctactcgcaggctgaggtgggaggattccttcagctcaggagctcaaggcagcagtgagctatgatccgtca

SEQ ID NO: 392 - DNA, 1817 bp, HUMAN
tataaaagcttggggctggggccgagcactggggactttgagggtggccaggccagcgtaggatcctgctgggagcggggaactgagggaagcgacgccgagaaagcaggcgtaccacggagggagagaaaagctccggaagcccagcagcgcctttacgcacagctgccaactggccgctgccgaccgtctccagctcccgaggacgcgcgaccggacaccgggtcctgccacagccgaggacagctcgccgctcgccgcagcgaggcccggggcggcccttcagggggacctttcccagatcgcccaggccgcccggatgtgcacgaaaatggaacagcctttctatcacgacgactcttacgcagcggcgggatacggtcggagccctggcagcctgtctctacacgactacaaactcctgaaacccaccttggcgctcaacctggcggatccctatcggggtctcaagggtcctggggcgcggggtccaggcccggagggcagtggggcaggcagctacttttcgggtcagggatcagacacaggcgcatctctgaagctagcctccacggaactggagcgcttgatcgtccccaacagcaacggcgtgatcacgacgacgcccacgcctccgggacagtacttttacccccgtgggggtggcagcggtggaggtacagggggcggcgtcaccgaggagcaggagggctttgcggacggttttgtcaaagccctggacgacctgcacaagatgaaccacgtgacgccccccaacgtgtccctgggcgccagcgggggtccccaggccggcccagggggcgtctatgctggtccggagccgcctcccgtctacaccaacctcagcagttactctccagcctctgcaccctctggaggctccgggaccgccgtcgggactgggagctcatacccgacggccaccatcagctacctcccacatgcaccaccctttgcgggcggccacccggcacagctgggtttgagtcgtggcgcttccgcctttaaagaggaaccgcagaccgtaccggaggcacgcagccgcgacgccacgccgcctgtgtcccccatcaacatggaagaccaggagcgcatcaaagtggagcgaaagcggctgcggaacaggctggcggccaccaagtgccggaagcggaagctggagcgcatcgcgcgcctggaggacaaggtgaagacactcaaggctgagaacgcggggctgtcgagtgctgccggtctcctaagggagcaagtggcgcagctcaagcagaaggtcatgacccatgtcagcaacggctgccagttgctgctaggggtcaagggacacgccttctgagagcctcccttgccccatacggacacccccagccttgaaggctgggcgcctgccccccactggggtgaggggggcaggcgatgggcacccgccaaaaggcctggggcgcagctcacacactggactccggcccgcccgcctgcgcccagtccttccacctcgaggtttacatggcccccttccagcgtattttgtatgttttttttttctgcaaagagactgaattcatattgaatataatatatttgtgtatttaacagggaggggagaagggggctgtcgcggcggagctggccccgccgcttggtactcagcctgcggggatactagggagggacctccgccccctgccctccccctctgcatagtactgtggagaagaaacacgcacttcgtgtctaaagtctattttaagatgtgtttgtgtgtgtgtgtttgactttttattgaatctatttaagta

SEQ ID NO: 393 - DNA, 2761 bp, HUMAN
caggactgggtctcctttccagggagaggaagagcccttcatggaaccgtctgcagcggctcagtcagtctcggctgtccagccagggtgtttggtggtgaggattcaggctccgtccagacaaggcagtggcctgaggctcagggccccccagcccctccctcccagtccatcagcgtcactccccagccccgagctggaccgcacaccttgggacacggttttccacttcctcaggacgagccccagactggaggagaggtcggaggaggtgggcgttgggctcttcacgaggaccccggcggcgggcccgggggaggcggccgaagcggcggcggccgggagcgacatggccgaggaacaagacctatcagaggtggagctgagccctgtgggctcggaggaaccccgctgcctgtccccaggcagcgcgccgtcgctgggacccgacggcggcggcggtggctcgggcttgcgagccagcccggggcccggtgaactgggcaaggtcaagaaggaacagcaggacggcgaggcggacgatgacaagttccccgtgtgcatccgcgaggcggtcagccaggtgctcagcggctacgactggacgctggtgcccatgcccgtgcgcgtcaacggtgccagcaagagcaagccgcacgtcaagaggcccatgaacgccttcatggtgtgggcacaggcggcacgcagaaagctagccgaccagtaccctcacctccacaatgctgagctcagcaagacactaggcaagctctggaggttgctgaacgaaagtgacaagcgccccttcattgaggaggctgagaggctccggatgcagcacaaaaaggaccatccggactacaagtaccaacctcggcggcggaagaacgggaaggcagcccagggggaggcagaatgcccaggcggggaagccgagcaaggaggggctgctgctattcaggctcactacaagagtgcccacctggaccaccggcacccagaagaaggctcccccatgtcagatgggaacccagagcacccctcaggccagagccatggccccccaacccctccaaccaccccaaagacagagctgcagtccggcaaggcagaccccaaaagggatgggcgctccttgggggagggcgggaagccccacatcgacttcggcaacgtggacatcggggagatcagccacgaggtaatgtccaacatggaaacctttgatgtgactgagctggaccaatacctgccacccaacgggcacccaggccatgtgggtagctactcggcagctggctacgggctgggcagtgccctggctgtggccagtggacactctgcctggatctccaagccaccaggtgtggctctgcccacggtctcgccccctggtgtggatgccaaagcccaggtgaagacagagaccacaggcccccagggacccccacactacaccgaccagccgtccacttcccagatcgcctacacttccctcagtctgccccactacggctccgccttcccctccatctcacgaccccagtttgactattctgaccatcagccctcaggaccctattatggccatgcaggccaggcctctggcctctattcagccttttcttacatggggccctcccagcggcccctctacactgccatctctgaccccagcccctcagggccccaatcccacagtcccacacactgggagcagccagtatatacgactctatcccgaccttagaggggccctgtcaccaccagtgcccacagggccttggggccccttcccccagcctgtgtgccctgctcctcatcagcctcaggcttggcagtggaggaggctgcagaggctgacagcagcaggaaggcttctgccagctcctgccctgatgacctccacccaccccggctctggaggccaagccctgactgagctggcaaaggaagtttggtggctctcccagactgagggtgaggggccacccttccccagaaatgaccctctatcccaggacctgagagtcctgctcagtccttcagggaggcaggaagggttagggtaggaggcctcactgctcctgttatctccttggagagcaaggggcccgtgtgctactgtgtcattgcctaagagctaagctgcccagggacctgcctcaaagcctggagctggttctgtcctgtcactaaggacgcactgaggacagctttgaacagctttgtaaagagcagggtgggacactctgatcctttctccgccccctcttcacctgaatgtgggaactggtcgaggtccccagatccagttccgtgtcaataacctcatcccttgcctaactgaggagagtccccatgttcttcccatcccaccccaggtgaggagccaggggctccaggaaagagtcagaggcaatccacctagccttcttctcgccttctgtcagcctcaagcccccaggctcagagttagcatggcacggccctagcccctgggttgctggcagcaggctggacactaaacccctgccatgtacagtctacctttgccttgcaccctttgctccagcgataccttaataaagtacgtagctctgtctccccatctcctgtctgcagcccagtccacatgtaacacatcgctgcccctttatttatctccatagtcgccatgttcctatccctctagctactccagccccgattaacttgcattaagcactccaagtaataaaatcaatgcttctggtttaaa

SEQ ID NO: 394 - DNA, 1466 bp, HUMAN
cggccttggatcctggaagagaatcgctaaacacagagcagacccagtaagtgagcaggtgttttggacaatggactggttgagcccatctctattataaaaatgtctcagagcaaccgggagctggtggtcgactttctctcctacaagctttcccagaaaggatacagctggagtcagtttagtgatgtcgaagagaataggactgaggccccagaagaaactgaagcagagagggagacccccagtgccatcaatggcaacccatcctggcacctggcggatagcccggccgtgaatggagccactggccacagcagcagtttggatgcgcgggaggtgattcccatggcagcagtgaagcaagcgctgagagaggcaggcgatgagtttgaactgcggtaccggagagcgttcagtgatctaacatcccagcttcacataaccccagggaccgcgtatcagagctttgagcaggtagtgaatgaactctttcgggatggagtaaactggggtcgcatcgtggcctttttctcctttggcggggcactgtgcgtggaaagcgtagacaaggagatgcaggtattggtgagtcggattgcaagttggatggccacctatctgaatgaccacctagagccttggatccaggagaacggcggctgggacacttttgtggatctctacgggaacaatgcagcagccgagagccggaaaggcaaggagggcttcaaccgctggtttctgacgggcatgactgtggctggtgtggttctgctgggctcactcttcagtcggaagtgaccagacactgaccgtccactcacctctcacctcccaccctgcccccaccacaactctctcttcagccaccattgctaccaggagaaccactacatgcaactcacgccccttgccctatcacagggttgggcctagacggagtcccctgcaattagctttctaggatctaccacacttctgtgaaagccaccttccccccacatctcagttctcttggcctcaaaactcacaaggttttcccctaaaccagctccttggaggctggcaggaacagagaggggtgtgtagggaggagagcctgtcttgttggtgggaccctaattacccctgagccttctcgggaatgcttttccagcagggagctcttcccctgaaggagactagcttgccttggttttgatgtgtgtggcctcagacgtgatcatttcccatccgctgtgtccctgggtctccctcctccccatctccaccccccaagagccattgagtgaggtgcttttagcccttttgactaattagaaattcaggctgcttgggataatgagacaaggaccagaacctcctccccacctgtggcctggccaaaacccccacttgtggtctgaatgttctcctgagcgctctggctagagtctacgctcacccagggggaggggcttagg

SEQ ID NO: 395 - DNA, 7225 bp, HUMAN
aagcttcttcccagaacctggaagcccagcaagcaaatgccctgcccccacccgacctccgccctcgttggcttcgcaaagctgtgatctgtggccagtagagggcacactttactttcgcaaatctgagagccacaacccgggggagggggcggggaaagagtctctgcagcaaaatgcagcctagggattggtggctcttggcgtttgaggcaaaatcctagaggctgtagtcattttgcaatccttaaagctgaattgtgcaatgagctcgatgaaggaagatactatcatccaacagctgaatcctaaattgcaaactcaatggctaatgactactttgaacaatgcgcaccttacacacgctacacgctactgtagtctcttctttttttagggggtagcagtgagaggtttcttaaaatgccttggggcgaggagtcctgaatgaggagactgctttgggttttgatgcgtaggataagcaaatcccgaggaaatatgcactatataataaatctagaaccaaaacacagagcaaaagattcatgtttcacgttggttaataaactaggttatcgtgtatatattaagtgtgtatacctttggggactctacaaaatgcacggcatggtattgaggaaaaagtaaattgggaaattagtgtaaaaattagagtcggcttttaattagtttaacacacacatacgaaggcaaagacacaacgttactttgatctgaccggggccgacctttttttaagtgcataattacgattccagtaataaaaggggaaagtttggggtttgtcctgagaggaaggggttaacggtttcctttattctagggtctccgcaggctccccagatctgggttggcaattctactcctccccctttctgggaagtccgggtttcccccaacccccaatccatggcatattctcgcgtctagcgccttgattcccgcccccccacacccccaacctctaagccggagtctggtgcaaactggctccacaggggcaaagaggatttgcctttagtggaaactggctgtggaactggaactctgagtggaggtgcatggggtgtagactggcagagactcgaccgggaggatccgggtagagcgcgcccaccgccgcagtcctactctactccagctctggaacgcgcagaaagacctacggggcaaggagccgcctccaccccaccccgcctggtggaaggtccgaacgggaggtgttggagtggagggcctttctggcagcaaattgggggattcattctgtaaagaatgtgcccagtcaacatagctgtacgcccaaacgcaaaatacacactgccctccccgagagatgcagtggctgtttattcctaagtggctctccaagtatacgtggcattgagttgctgagcaattttaatgattccaggcatcgtttttctgctcagacctcatctgtcgtaggtcttcaactatcactccacactgagcaagggctcctacataactctttttttttttcgtccttccctttttaaattctgtttccccgaccttagagagacgactggccgcccgagacgtgcgtgacgcggctcagggtacacggcgtattgtgtggagcgaggcagctgttccacctgcggtgactaatacacgcaggacaagaacacagttcagccgagcgctgcgcccgaacaactgtacagaaagggaaaggaccgacgcgcgagcaggagaaaatggtcgggcgcgcagttaattcatgctgcgctattactgtttacaccccgagtcggagtactgggctgcgggactgaggctcctcctctttccccggctccccactagtgcccctcccgagttcccaaagcagagggcgggggagcgagaggaggaaaaaaatagaggtcgggaggggagggagaaagagattctctggcctaatccccgcccacccgccctttataatccgggggtctgcgcggctaaggacccccgggctgcgctgctctccgctgccgcctccgccgcgcccactccgctcgcctcctgcctccaaaagggcaggcgttcgccgaggcttggcgggaaaaagaagcgaggggagggatccggagtcgcagtataaaagaagcttttcgggcgttttttttctgactcgctgtagtaattccagcgagagacagagggagtgagcgggcgggttggaagagcccagtgtgcagagccccactccgggcttcctaggaaggcagctctggagtgagaagggctttgcctccaggcttgctgcctcctcgacccaatcctcccgctgacccaacatcagcggtcgcaaccctcgccgcctctgggaaactttgcccattgcaacgggcagacacttctcactggaacttacaatctgcgagccaggacaggactccccaggcgcaggggagggaatttttgtctatttggggacagtgttctctgcctctgcccgcgatcggctcccctgaaaagagctcctcgcgttatttgaagcctgaatttcctttgggaggtggaaaacccggtaagcacagatctgttggtcttctactgttttctctacgtcctgagtgtagcgaccggttagaacagtctttattcaatttctgtgcttttgacactttactcagagtagttggggtaggccggggcggagttggggtggatctgagtcggggtagaacgacttgtcaagatgacaggaaaggggaaggaaaaaaccggggtgcattttgaaactgtcttccagaggttaccgtgggctgacgctgacccgggccggttggacattcttgctgtgctacattaattgatatttatgtcctttggggggggggtgtcaaagccggaggtctcttcgcggtggccaaaggaagcccttcgtatcctgaggtctttgggaaagggattaccttttgcgtgttctccgcaaaaagcgagaaggctccgtagcctctgacttcccagtctttgggagggcatttaaatttcggcttggtgcatttctgacagcctgagaccaactcgggggtgcgtcccgcccgccaatccccggcggcgattgcaaccggtccctgatccttttaagaagttgccattgggctttaaaaatagtgatcatagtaaaatttaagcctaaccctccgcggtattaggacttggtgttggactagcgcactgaggagaggcaaaactggggcagggatgtgacagattcgttgacttggggaaaaccagagggaatcctcacattcctggttgggatccgcgggtattccccgcgcccctgaattgctagggagactgcggtgagtcttgatctgagctgttcggtaacagctgctaccctcggcggggagagggaagacgccctgcaccgggtgctgaatcgctgtggggtctctggcgcagtggcgtcgcggtttagagtgtagcagggaggtgtctcttattatttgacaccccctcccctttggagaggcttgttagagcctgagactgagctctcccctccaagtcagcaataggaaagaaaagccggcaaaggaaggaaggggggcgcgctgggggtggagaaagaggagggcggagaggggcggcggcgccggctgggtaagagccgggcgacggcgcgagtagggacccggacccggtcggcggcgcaaagagccggcaccggagggggccgagcaccgcggcgcctctcgcctttctccttcaggtggcgcaaaactttgcgcctaggcttttggcagactgtattccctacagtcgcctccctcagcctctgaaggaggccaaggccgatggcgattcctgggcgtctgcagtgctaagtccctgctctaaggaggcggggactccgagcagctgctagtccgaccagcgtcactgatagtagggagtaaaagagtgcattccccccaaccacacacacacacacacacacacacacacacacacacacacacacacacacacttggaagtacagcaggctgaaaggggagtggttcaggattggggtacgcgctgcgccaggtttccgcatcaaccagagctgggtaactctagacttgcttcccttgctgtgccccctccaacagacagtcacgacgatgcccctcaacgtgagcttcgctaacaggaactatgacctcgactacgactcggtgcagccctatttcatctgcgacgaggaagagaatttctatcaccagcaacagcagagcgagctgcagccgcccgcacccagtgaggatatctggaagaaattcgagctgctgcccaccccgcccctgtcccccagccgccgctccgggctctgctctccgtcctatgtcgcggtcgctacgtccttctccccaagggaggacgatgacggtggcggtggcaacttctccaccgccgatcagctggagatgatgaccgagctacttggaggagacatggtgaatcagagcttcatctgcgatcctgacgatgagaccttcatcaagaacatcatcatccaggactgtatgtggagcggcttctcggccgctgccaaactggtctccgagaagctggcctcttaccaggctgcgcgcaaagacagcaccagcctgagccccgcccgcgggcacagcgtctgctccacctccagcctgtacctgcaggacctcaccgccgcagcgtccgagtgcatcgacccctcagtggtcttcccctacccgctcaacgacagcagctcgcccaaatcctgtacctcgtccgattccacggccttctcttcttcctcggactcgctgctgtcctccgagtcctccccacgggccacccctgagcccctagtgctgcatgaagagacaccgcccaccaccagcagcgactctggtaagccgccccaaccccagcagggtaggaagccagaggttggatggacctccttctcattggcattaattcaattggcccccgggctcaccctttctttcccttcggtctaagctcttcatccctggactcctgtgcttcagatatccctccccttcccccagaccgccctggttgtcagccccacccccacccttcccacccctcaggaatttcatttgggtttttaaatcttctggcttatctttcaactcaatccactccctttacccctcctaggcattttaattacccagagaagggtgtgaaggaggatagggaactgatcctgagaagagtgaatgaattacctgcttttctttgacttcagaagaatatttgaatttaatgtctacaagacccaagagaagcaatgacagaagcaggacagcctttagcctcagagccaggcactagtgaaagatcctgaagagttgaagagctgttttccctccatcccgttttgaacacttcaaagcaaatcctcttcagtttggattttcgtaccccctccctccccaaatgctcgccccaccactgccaccaccaggacaggacgtttggcaaaaccacaagactttactattgcacttccagtaatatagggagttggtaaagtcatagcaagatatttgcagctatcgcctacaggacctgaagggttcttggtgaagtcccttaaaaatgggaggtgcttgggaatgtgctttgctttgggtgtgtctgaagcctcattaagtcttaggtaagaattggcaacgatgccatatcctggtacatggtaattttctcacctgtgccctaaccctgttctacctttctgggaaacgggaggatggtgtctagatctggttcttacttctcaatcctttccaacttggcacttggatagcatcggtcaaacccccatctgggattcaggaggcattgctaactaatcttccacttccttccttacagaagaagaacaagatgatgaggaagaaattgatgtggtgtctgtggaaaagaggcaaccccctgccaagaggtccgagtcagggtcatccccatcaagaggccacagcaaacctccacacagcccactggtcctcaagaggtgccatgtctctactcaccagcacaattatgcagcacccccctccacaaggaaggactatccagctgccaagagggccaagttggacagtggcagggtcctgaaacagatcagcaacaaccgcaaatgctccagccccaggtcctcagacaccgaggaaaacgacaagaggcggacacacaacgtcttggaacgtcagaggagaaacgagctgaagcgtagcttttttgccctgcgcgaccagatccctgagttggaaaacaacgaaaaggcccccaaggtagttatcctcaaaaaagccaccgcctacatcctgtccgttcaagcagatgagcacaaactcatctcagaaaaggacttactgaggaaacggcgagaacagttgaaacacaaactcgaacagcttcgaaactctggtgcataaactgaccggaagtgaggaggagctggaatctcgagtgtaaggagaacggttccttctgacagaacttggacttcaaaaaatgcatgctcaaagcctaacctcacaaccttggctggggctttgggacttcagccataatgttaactgcctcaaagttaaggcataaaagaacttttttttatgcttcccatcttctttctttttcctttaacagatttgtatttaattgttttttttaaaaaaatcttccggtgtacatagggcctttaaatgtaaataactttaataaaacgtttataacagttatacaagattttaagacatgtatgataaaccataattttttttatttaaagaccttttcatttttaaagttgatttttttctattgtttttagaaaaaataaaataattggaaaaaatataattgagccaactcttaaatggtgttttcttttttttttttcctccaatttctcttcctcaactatagatgaacagaactgaccgtcttcccaggacgggtttacaagggtgggaaggggttatcttaaaatggggcgggggaggggggtgcctcaagacctctaagttcccagtgttatgagatcctttctgtggatgctgataggatgagagttgagaaagggcaaaaggcaagtgaggttagatacaaggaacagggaagcaagaggttaaagatagcagacagggaagagatggcagaatgaatctcctgcagtt

SEQ ID NO: 396 - DNA, 494 bp, HUMAN
cggccaccgccgtctgggaggtgaggggcgcctctgcccggccgcccctactgggaagtgaggagcccctctgcccagccaccaccccgtctgggaggtgtgcccaacagctcattgagaacgggccaggatgacaatggcggctttgtggaatagaaaggcgggaaaggtggggaaaagattgagaaatcggatggttgccgtgtctgtgtagaaagaagtagacatgggagacttttcattttgttctgcactaagaaaaattcctctgccttgggatcctgttgatctgtgaccttacccccaaccctgtgctctctgaaacatgtgctgtgtccactcagggttaaatggattaagggcggtgcaagatgtgctttgttaaacagatgcttgaaggcagcatgctcgttaagagtcatcaccactccctaatctcaagtaatcagggacacaaacactgcggaaggccgcagggtcctctgcctaggaaa

SEQ ID NO: 397 - DNA, 2442 bp, HUMAN
cagatggctccataatgacagcttcataatggcagtgggtgagcccctggtgcacatcagggtcactcttctgctgctctggttggggatgtttttgtctatttctggccactctcaggccaggccctcccagtatttcacttctccagaagtggtgatccctttgaaggtgatcagcaggggcagaggtgcaaaggctcctggatggctctcctatagcctgcggtttgggggacagagatacattgtccacatgagggtaaataagctgttgtttgctgcacaccttcctgtgttcacctacacagagcagcatgccctgctccaggatcagcccttcatccaggatgactggtactaccatggttatgtggagggggtccctgagtccttggttgcccttagtacctgttctgggggctttcttggaatgctacagataaatgaccttgtttatgaaatcaagccaattagtgtttctgccacatttgaacacctagtatataagatagacagtgatgatacacagtttccacctatgagatgtgggttaacagaagagaaaatagcacaccagatggagttgcaattgtcatataatttcactctgaagcaaagttcttttgtgggctggtggacccatcagcggtttgttgagctggtagtggtcgtggataatattagatatcttttctctcaaagtaatgcaacaacagtgcagcatgaagtatttaacgttgtcaatatagtggattccttctatcatcctttggaggttgatgtaattttgactggaattgatatatggactgcatcaaatccacttcctaccagtggagacctagataatgttttagaggacttttctatttggaagaattataaccttaataatcgactacaacatgatgttgcacatcttttcataaaagacacacaaggcatgaagcttggtgttgcctatgttaaaggaatatgccagaatccttttaatactggagttgatgtttttgaagacaacaggttggtcgtttttgcaattactttgggccacgagcttggtcataatttgggtatgcaacatgacacccagtggtgtgtgtgcgagctacagtggtgcataatgcatgcctatagaaaggtgacaactaaatttagcaactgcagttatgcccaatattgggacagtactatcagtagtggattatgtattcaaccgcctccatatccagggaatatatttagactgaagtactgtgggaatctagtggttgaagaaggggaggaatgtgactgtggaaccatacggcagtgtgcaaaagatccctgttgtctgttaaactgtactctacatcctggggctgcttgtgcttttggaatatgttgcaaagactgcaaatttctgccatcaggaactttatgtagacaacaagttggtgaatgtgaccttccagagtggtgcaatgggacatcccatcaatgcccagatgatgtgtatgtgcaggacgggatctcctgtaatgtgaatgccttctgctatgaaaagacgtgtaataaccatgatatacaatgtaaagagatttttggccaagatgcaaggagtgcatctcagagttgctaccaagaaatcaacacccaaggaaaccgtttcggtcactgtggtattgtaggcacaacatatgtaaaatgttggacccctgatatcatgtgtgggagggttcagtgtgaaaatgtgggagtaattcccaatctgatagagcattctacagtgcagcagtttcacctcaatgacaccacttgctggggcactgattatcatttagggatggctatacctgatattggtgaggtgaaagatggcacagtatgtggtccagaaaagatctgcatccgtaagaagtgtgccagtatggttcatctgtcacaagcctgtcagcgtaagacctgcaacatgaggggaatctgcaacaacaaacaacactgtcactgcaaccatgaatgggcacccccatactgcaaggacaaaggctatggaggtagtgctgatagtggcccacctcctaagaacaacatggaaggattaaatgtgatgggaaagttgcgttacctgtcactattgtgccttcttcctttggttgcttttttattattttgcttacatgtgctttttaagaaacgcacaaaaagtaaagaagatgaagaaggataagagaaatgggaaaaagaaggagactaaactttatacttcatttttaatatccaattttttaatagaaaaatatgaagccatgtctcactgtttaaataaaacttcatggacatttcatgtcaggattgcaagcattagctatcacagcaaaggattcctagcctattcttacttactttacagtgtcttaagcaatattaaaggttccttttcccaaaaaaaaaaaaaaaaaa

SEQ ID NO: 398 - DNA, 3711 bp, HUMAN
  misc_feature (1)..(3711): N=any base
acagggtcgctgagaccagtgcacgagcctcttcggaagatgcatcctggactcttggccgcagaagagaaagcggttggggtctcccagggactctttctaaagggtcagtccaccatggtaggggttaacgtgggtccacccgtatagggaaaggaaagaaattgtatttgacacttcaggggggcgggtggcggacgggtctcgctgcctgattggttttgcatttcatcccaatttttttttctccactctctctccctcttttcagtttctctctctgatcccaggggaggggaaacgggaatagtgagagatcaaaaataaacctcttatgtcaagccgggaaggaagtataaataagaagggctcggcagcccactcggtgcttcccggggtggggaggaggcaggaggcggctgcgcggggctggcgcgggcaggggcggaggacgggcgcacgcgggccggggccagctgctcgcgctcggctcgggggcggcggcgcgggaggagcgggctgcgccagccagaggggccgccgggggagcgctcccgccgccgggccccgcgggcggagtcggccttgcacccgattgattccgttttcctggagagagcggccgggccgcgctcgggccgccagcacctgcccgcgcctggcgggtttttccttttcctgcgcgcagccaccgccgcagcccccatgttccccgcccccgccgccccccggtggcttccgttcctgctgctgctgctgctgctgctgctgccgctggcccgcggcgccccggcccggcccgcagccggggggcaggcctcggagctggtggtgcccacgcggttgcccggcagcgcgggcgagctcgcgctccacctgtccgccttcggcaagggcttcgtgttgcgcctggcgcccgacgacagcttcctggcgcccgagttcaagatcgagcgcctcgggggctccggccgggcgaccgggggcgagcgggggctgcgcggctgttttttttccggcaccgtgaatggggagcccgagtcgctggcggcggtcagcctgtgccgcgggctgagcggctccttcctgctggacggcgaggagttcaccatccagccgcagggcgcggggggctccctggctcagccgcaccgcctgcagcgctggggtcccgccggagcccgccccctcccgcgaggacccgagtgggaggtggagacgggagagggtcagaggcaggagagaggagaccaccaggaggacagcgaggaggagagccaagaagaggaggcagaaggcgctagcgagccgccaccgcccctgggggccacgagtaggaccaagcggtttgtgtctgaggcgcgcttcgtggagacgctgctggtggccgatgcgtccatggctgccttctacggggccgacctgcagaaccacatcctgacgttaatgtctgtggcagcccgaatctacaagcaccccagcatcaagaattccatcaacctgatggtggtaaaagtgctgatcgtagaagatgaaaaatggggcccagaggtgtccgacaatggggggcttacactgcgtaacttctgcaactggcagcggcgtttcaaccagcccagcgaccgccacccagagcactacgacacggccatcctgctcaccagacagaacttctgtgggcaggaggggctgtgtgacaccctgggtgtggcagacatcgggaccatttgtgaccccaacaaaagctgctccgtgatcgaggatgaggggctccaggcggcccacaccctggcccatgaactagggcacgtcctcagcatgccccacgacgactccaagccctgcacacggctcttcgggcccatgggcaagcaccacgtgatggcaccgctgttcgtccacctgaaccagacgctgccctggtccccctgcagcgccatgtatctcacagagcttctggacggcgggcacggagactgtctcctggatgcccctggtgcggccctgcccctccccacaggcctcccgggccgcatggccctgtaccagctggaccagcagtgcaggcagatctttgggccggatttccgccactgccccaacacctctgctcaggacgtctgcgcccagctttggtgccacactgatggggctgagcccctgtgccacacgaagaatggcagcctgccctgggctgacggcacgccgtgcgggcctgggcacctctgctcagaaggcagctgtctacctgaggaggaagtggagaggcccaagcccgtggtagatggaggctgggcaccgtggggaccctggggagaatgttctcggacctgtggaggaggagtacagttttcacaccgtgagtgcaaggaccccgagcctcagaatggaggaagatactgcctgggtcggagagccaagtaccagtcatgccacacggaggaatgcccccctgacgggaaaagcttcagggagcagcagtgtgagaagtataatgcctacaattacactgacatggacgggaatctcctgcagtgggtccccaagtatgctggggtgtccccccgggaccgctgcaagttgttctgccgagcccgggggaggagcgagttcaaagtgttcgaggccaaggtgattgatggcaccctgtgtgggccagaaacactggccatctgtgtccgtggccagtgtgtcaaggccggctgtgaccatgtggtggactcgcctcggaagctggacaaatgcggggtgtgtgggggcaaaggcaactcctgcaggaaggtctccgggtccctcacccccaccaattatggctacaatgacattgtcaccatcccagctggtgccactaatattgacgtgaagcagcggagccacccgggtgtgcagaacgatgggaactacctggcgctgaagacggctgatgggcagtacctgctcaacggcaacctggccatctctgccatagagcaggacatcttggtgaaggggaccatcctgaagtacagcggctccatcgccaccctggagcgcctgcagagcttccggcccttgccagagcctctgacagtgcagctcctgacagtccctggcgaggtcttccccccaaaagtcaaatacaccttctttgttcctaatgacgtggactttagcatgcagagcagcaaagagagagcaaccaccaacatcatccagccgctgctccacgcacagtgggtgctgggggactggtctgagtgctctagcacctgcggggccggctggcagaggcgaactgtagagtgcagggacccctccggccaggcctctgccacctgcaacaaggctctgaaacccgaggatgccaagccctgcgaaagccagctgtgccccctgtgattcaggggggcaggggccagtcttgtgctcctggacatgcggtactgaggtgcagacaaggtctccactgtggtgactgggtcccttggccatatcaaggcagcacggcccacccaggcctcccattgccgcaacccctccagtactgcacaaattcctaagggggaagagaaaaggtatggggcggcaaaacctatcatcaactgtccawtgnaatggaacttgctcgggttcaattaaaggcataagttaaagtaaattcattatgatcaacagacctcacntcatctgttgcangatacaactantaaaaaaaaaaaaaaaaaaaaaaaa

SEQ ID NO: 399 - DNA, 1936 bp, HUMAN
tctggagccaagtaatggtgatactgatgcttccttttctttgccgcgctcggattctgagtttcacaagaatgtacctgggtgccccttagcgggatatgaatagcttcttcggaaccccagcggccagctggtgcctcctggaaagtgacgtctcatctgcaccggacaaggaggcggggagggagcgcagagcactcagcgtccagcagcgcggcgggccagcctggagcggaagcctggagtggagcaggcagtccgcgggggacagacgtcggctgggattgagccggcagactgcgaaaagtagctggagccggagcagggacagaacctgttgctgcagacgggcttggtggattctggttcctgccgccgacagggctcgccgggagaggttcatcatgaatgagaaatgggacacaaactcttcagaaaactggcatcccatctggaatgtcaatgacacaaagcatcatctgtactcagatattaatattacctatgtgaactactatcttcaccagcctcaagtggcagcaatcttcattatttcctactttctgatcttctttttgtgcatgatgggaaatactgtggtttgctttattgtaatgaggaacaaacatatgcacacagtcactaatctcttcatcttaaacctggccataagtgatttactagttggcatattctgcatgcctataacactgctggacaatattatagcaggatggccatttggaaacacgatgtgcaagatcagtggattggtccagggaatatctgtcgcagcttcagtctttacgttagttgcaattgctgtagataggttccagtgtgtggtctacccttttaaaccaaagctcactatcaagacagcgtttgtcattattatgatcatctgggtcctagccatcaccattatgtctccatctgcagtaatgttacatgtgcaagaagaaaaatattaccgagtgagactcaactcccagaataaaaccagtccagtctactggtgccgggaagactggccaaatcaggaaatgaggaagatctacaccactgtgctgtttgccaacatctacctggctcccctctccctcattgtcatcatgtatggaaggattggaatttcactcttcagggctgcagttcctcacacaggcaggaagaaccaggagcagtggcacgtggtgtccaggaaaaagcagaagatcattaagatgctcctgattgtggccctgctttttattctctcatggctgcccctgtggactctaatgatgctctcagactacgctgacctttctccaaatgaactgcagatcatcaacatctacatctacccttttgcacactggctggcattcggcaacagcagtgtcaatcccatcatttatggtttcttcaacgagaatttccgccgtggtttccaagaagctttccagctccagctctgccaaaaaagagcaaagcctatggaagcttataccctaaaagctaaaagccatgtgctcataaacacatctaatcagcttgtccaggaatctacatttcaaaaccctcatggggaaaccttgctttataggaaaagtgctgaaaaaccccaacaggaattagtgatggaagaattaaaagaaactactaacagcagtgagatttaaaaagagctagtgtgataatcctaactctactacgcattatatatttaaatccattgctttttgtggctttgcacttcaaatttttcaaagaatgttctaaataaaacatttactgaaagccctctctggcaaaaaaattaaaaataaacaaaaatggtcataagatcataaacaatcttatgttgtataaaaatacgtagagtgacttagacatgtttgcatgaataaatatatttctagagaacagttaaaaaaaaaaaaaaaaaaaa

SEQ ID NO: 400 - DNA, 8056 bp, HUMAN
agcttgtttggccgttttagggtttgttggaatttttttttcgtctatgtacttgtgaattatttcacgtttgccattaccggttctccatagggtgatgttcattagcagtggtgataggttaattttcaccatctcttatgcggttgaatagtcacctctgaaccactttttcctccagtaactcctctttcttcggaccttctgcagccaacctgaaagaataacaaggaggtggctggaaacttgttttaaggaaccgcctgtccttcccccgctggaaaccttgcacctcggacgctcctgctcctgcccccacctgacccccgccctcgttgacatccaggcgcgatgatctctgctgccagtagagggcacacttactttactttcgcaaacctgaacgcgggtgctgcccagagagggggcggagggaaagacgctttgcagcaaaatccagcatagcgattggttgctccccgcgtttgcggcaaaggcctggaggcaggagtaatttgcaatccttaaagctgaattgtgcagtgcatcggatttggaagctactatattcacttaacacttgaacgctgagctgcaaactcaacgggtaataacccatcttgaacagcgtacatgctatacacgcacccctttcccccgaattgttttctcttttggaggtggtggagggagagaaaagtttacttaaaatgcctttgggtgagggaccaaggatgagaagaatgttttttgtttttcatgccgtggaataacacaaaataaaaaatcccgagggaatatacattatatattaaatatagatcatttcagggagcaaacaaatcatgtgtggggctgggcaactagctaagtcgaagcgtaaataaaatgtgaatacacgtttgcgggttacatacagtgcactttcactagtattcagaaaaaattgtgagtcagtgaactaggaaattaatgcctggaaggcagccaaattttaattaactcaagactcccccccccccaaaaaaaggcacggaagtaatactcctctcctcttctttgatcagaatcgatgcattttttgtgcatgaccgcatttccaataataaaaggggaaagaggacctggaaaggaattaaacgtccggtttgtccggggaggaaagagttaacggtttttttcacaagggtctctgctgactcccccggctcggtccacaagctctccacttgccccttttaggaagtccggtcccgcggttcgggtaccccctgcccctcccatattctcccgtctagcacctttgatttctcccaaacccggcagcccgagactgttgcaaaccggcgccacagggcgcaaaggggatttgtctcttctgaaacctggctgagaaattgggaactccgtgtgggaggcgtgggggtgggacggtggggtacagactggcagagagcaggcaacctccctctcgccctagtccagctctggaacaggcagacacatctcagggctaaacagacgcctcccgcacggggccccacggaagcctgagcaggcggggcaggaggggcggtatctgctgctttggcagcaaattgggggactcagtctgggtggaaggtatccaatccagatagctgtgcatacataatgcataatacatgactccccccaacaaatgcaatgggagtttattcataacgcgctctccaagtatacgtggcaatgcgttgctgggttattttaatcattctaggcatcgttttcctccttatgcctctatcattcctccctatctacactaacatcccacgctctgaacgcgcgcccattaatacccttctttcctccactctccctgggactcttgatcaaagcgcggccctttccccagccttagcgaggcgccctgcagcctggtacgcgcgtggcgtggcggtgggcgcgcagtgcgttctcggtgtggagggcagctgttccgcctgcgatgatttatactcacaggacaaggatgcggtttgtcaaacaatactgctacggaggagcagcagagaaagggagagggtttgagagggagcaaaagaaaatggtaggcgcgcgtagttaattcatgcggctctcttactctgtttacatcctagagctagagtgctcggctgcccggctgagtctcctccccaccttccccaccctccccaccctccccataagcgcccctcccgggttcccaaagcagagggcgtgggggaaaagaaaaaagatcctctctcgctaatctccgcccaccggccctttataatgcgagggtctggacggctgaggacccccgagctgtgctgctcgcggccgccaccgccgggccccggccgtccctggctcccctcctgcctcgagaagggcagggcttctcagaggcttggcgggaaaaagaacggagggagggatcgcgctgagtataaaagccggttttcggggctttatctaactcgctgtagtaattccagtgagaggcagagggagcgagcgggcggccggctagggtggaagagccgggcgagcagagctgcgctgcgggcgtcctgggaagggagatccggagcgaatagggggcttcgcctctggcccagacctcccgctgatcccccaggcagcggtccgcaacccttgccgcatccacgaaactttgcccatagcagcgggcggacactttgcactggaactgacaacacccgaccaaggacgcgactctcccgacgcggggaggctattctgcccatttggggacacttccccgccgctgccaggacccgcttctctgaaaggctctccttgcagctgcttagatactgaatttttttcgggaagtggaaaaccaggtaagcatcgaagtccacttgtcttttaatttacttttttatcagtttaattctgagatgagtcgaatgcctaaatagggtgtcttttctcccaatcctgcgttattgacacctttctcggggtgggggttattccagaattggatcggggtacagtgacttgtcaagatgggggaggagaagacagagggaaaacgggaatggtttttacgattatcctttcgagatttctgccttatgaatatattcacgtcgactcccggccggtcggacattcctactttattgtgttaattgttctctgggttttggggggcggggggttgctttgcggtgggcagaaagtcccttgcatcttgagctccttggagaagggaccgcatatcgcctgtgtgagccagatcgctccgcaggcgctgacttgtccccgtctccgggagggcagttaaatctcgactcaccgcatttctgacagccggagacggacactgcggcgcgtcccgcccgcctgtccccgcggcgattccaacccgccctgattcttttaagaagttgacatttggctttttaaaaagcaataaaacaatttaaaacctgggtctctagaagtgttaggacgtggtgttgggtaggcgcaggcaggggaaaagggaggcgaggatgtgtccgattctcctgcaatcgttgacttggaaaaaccagggcgaatctccgcacccagtcctgactcccctgccgcggccgccctcgggtgtcctcgcgcccgagatgcggaggaactgcgaggagcggggctctgggcggttccaaaacagctgctacccttggtggggtggctccgggggaggtatcgcagcggggtctctggcgcagttgcatctccgtattgagtgcgaagggaggtgcccctattattatttgacaccccccttgtatttatggaggggtgttaaagtccgcggctgagctcgccactccagccggcgagagaaagaagaaaagctggcaaaaggagtgttggacgggggcagtactgggggtggggacgggggcggtggagagggaaggttgggaggggctgcggtgccggcgggggtaggagagcgcctagggcgcgagtgggaacagccgcagcggaggggccccggcgcggagcggggttcacgcagccgctttcgcccaggcgcctttcgccttctccttcaggtggcgcaaaactttgtgccttggattttggcaaattgtattcctcaccgccacctcccgcggcttcttaagggcgccagggccgatttcgattcctctgccgctgcggggccgactcccgggctttgcgctccgggctcccgggggagcgggggctcggcgggtaccaagacgctggttcactaagtgcgtctccgagatagcaggggactgtccaaagggggtgaaagggtgctccctttattcccccaccaagaccacccagccgctttaggggatagctctgcaaggggagaggttcgggactgtggcgcgcactgcgcgctgcgccaggtttccgcaccaagacccctttaactcaagactgcctcccgctttgtgtgccccgctccagcagcctcccgcgacgatgcccctcaacgttagcttcaccaacaggaactatgacctcgactacgactcggtgcagccgtatttctactgcgacgaggaggagaacttctaccagcagcagcagcagagcgaactgcagcccccggcgcccagcgaggatatctggaagaaattcgagctgctgcccaccccgcccctgtcccctagccgccgctccgggctctgctcgccctcctacgttgcggtcacacccttctcccttcggggagacaacgacggcggtggcgggagcttctccacggccgaccagctggagatggtgaccgagctgctgggaggagacatggtgaaccagagtttcatctgcgacccggacgacgagaccttcatcaaaaacatcatcatccaggactgtatgtggagcggcttctcggccgccgccaagctcgtctcagagaagctggcctcctaccaggctgcgcgcaaagacagcggcagcccgaaccccgcccgcggccacagcgtctgctccacctccagcttgtacctgcaggatctgagcgccgccgcctcagagtgcatcgacccctcggtggtcttcccctaccctctcaacgacagcagctcgcccaagtcctgcgcctcgcaagactccagcgccttctctccgtcctcggattctctgctctcctcgacggagtcctccccgcagggcagccccgagcccctggtgctccatgaggagacaccgcccaccaccagcagcgactctggtaagcgaagcccgcccaggcctgtcaaaagtgggcggctggatacctttcccattttcattggcagcttatttaacgggccactcttattaggaaggagagatagcagatctggagagatttgggagctcatcacctctgaaaccttgggctttagcgtttcctcccatcccttccccttagactgcccatgtttgcagcccccctccccgtttgtctcccacccctcaggaatttcatttaggtttttaaaccttctggcttatcttacaactcaatccacttcttcttacctcccgttaacattttaattgccctggggcggggtggcagggagtgtatgaatgaggataagagaggattgatctctgagagtgaatgaattgcttccctcttaacttccgagaagtggtgggatttaatgaactatctacaaaaatgaggggctgtgtttagaggctaggcagggcctgcctgagtgcgggagccagtgaactgcctcaagagtgggtgggctgaggagctgggatcttctcagcctattttgaacactgaaaagcaaatccttgccaaagttggactttttttttcttttattccttcccccgccctcttggacttttggcaaaactgcaattttttttttttttatttttcatttccagtaaaatagggagttgctaaagtcataccaagcaatttgcagctatcatttgcaacacctgaagtgttcttggtaaagtccctcaaaaataggaggtgcttgggaatgtgctttgctttgggtgtgtccaaagcctcattaagtcttaggtaagaattggcatcaatgtcctatcctgggaagttgcacttttcttgtccatgccataacccagctgtctttccctttatgagactcttaccttcatggtgagaggagtaagggtggctggctagattggttctttttttttttttttccttttttaagacggagtctcactctgtcactaggctggagtgcagtggcgcaatcaacctccaaccccctggttcaagagattctcctgcctcagcctcccaagtagctgggactacaggtgcacaccaccatgccaggctaatttttgtaattttagtagagatggggtttcatcgtgttggccaggatggtctctcctgacctcacgatccgcccacctcggcctcccaaagtgctgggattacaggtgtgagccagggcaccaggcttagatgtggctctttggggagataattttgtccagagacctttctaacgtattcatgccttgtatttgtacagcattaatctggtaattgattattttaatgtaaccttgctaaaggagtgatttctatttcctttcttaaagaggaggaacaagaagatgaggaagaaatcgatgttgtttctgtggaaaagaggcaggctcctggcaaaaggtcagagtctggatcaccttctgctggaggccacagcaaacctcctcacagcccactggtcctcaagaggtgccacgtctccacacatcagcacaactacgcagcgcctccctccactcggaaggactatcctgctgccaagagggtcaagttggacagtgtcagagtcctgagacagatcagcaacaaccgaaaatgcaccagccccaggtcctcggacaccgaggagaatgtcaagaggcgaacacacaacgtcttggagcgccagaggaggaacgagctaaaacggagcttttttgccctgcgtgaccagatcccggagttggaaaacaatgaaaaggcccccaaggtagttatccttaaaaaagccacagcatacatcctgtccgtccaagcagaggagcaaaagctcatttctgaagaggacttgttgcggaaacgacgagaacagttgaaacacaaacttgaacagctacggaactcttgtgcgtaaggaaaagtaaggaaaacgattccttctaacagaaatgtcctgagcaatcgcctatgaacttgtttcaaatgcatgatcaaatgcaacctcacaaccttggctgagtcttgagactgaaagatttagccataatgtaaactgcctcaaattggactttgggcataaaagaacttttttatgcttaccatcttttttttttctttaacagatttgtatttaagaattgtttttaaaaaattttaagatttacacaatgtttctctgtaaatattgccattaaatgtaaataactttaataaaacgtttatagcagttacacagaatttcaatcctagtatatagtacctagtattataggtactataaaccctaattttttttatttaagtacattttgctttttaaagttgatttttttctattgtttttagaaaaaataaaataactggcaaatatatcattgagccaaatcttaagttgtgaatgttttgtttcgtttcttccccctcccaaccaccaccatccctgtttgttttcatcaattgccccttcagagggtggtcttaagaaaggcaagagttttcctctgttgaaatgggtctgggggccttaaggtctttaagttcttggaggttctaagatgcttcctggagactatgataacagccagagttgacagttagaaggaatggcagaaggcaggtgagaaggtgagaggtaggcaaaggagatacaagaggtcaaaggtagcagttaagtacacaaagaggcataaggactggggagttgggaggaaggtgaggaagaaactcctgttactttagttaaccagtgccagtcccctgctcactccaaacccaggaatt

SEQ ID NO: 401 - DNA, 1487 bp, HUMAN
ctagcactctgacctagcagtcaacatgaaggctctcattgttctggggcttgtcctcctttctgttacggtccagggcaaggtctttgaaaggtgtgagttggccagaactctgaaaagattgggaatggatggctacaggggaatcagcctagcaaactggatgtgtttggccaaatgggagagtggttacaacacacgagctacaaactacaatgctggagacagaagcactgattatgggatatttcagatcaatagccgctactggtgtaatgatggcaaaaccccaggagcagttaatgcctgtcatttatcctgcagtgctttgctgcaagataacatcgctgatgctgtagcttgtgcaaagagggttgtccgtgatccacaaggcattagagcatgggtggcatggagaaatcgttgtcaaaacagagatgtccgtcagtatgttcaaggttgtggagtgtaactccagaattttccttcttcagctcattttgtctctctcacattaagggagtaggaattaagtgaaaggtcacactaccattatttccccttcaaacaaataatatttttacagaagcaggagcaaaatatggcctttcttctaagagatataatgttcactaatgtggttattttacattaagcctacaacatttttcagtttgcaaatagaactaatactggtgaaaatttacctaaaaccttggttatcaaatacatctccagtacattccgttcttttttttttttgagacagtctcgctctgtcgcccaggctggagtgcagtggcgcaatctcggctcactgcaacctccacctcccgggttcacgccattctcctgcctcagcctcccgagtagctgggattacgggcgcccgccaccacgcccggctaattttttgtatttttagtagagacagggtttcaccgtgttagccaggatggtctcgatctcctgaccttgtgatccacccacctcggcctcccaaagtgctgggattacaggcgtgagccactgcgcccggccacattcagttcttatcaaagaaataacccagacttaatcttgaatgatacgattatgcccaatattaagtaaaaaatataagaaaaggttatcttaaatagatcttaggcaaaataccagctgatgaaggcatctgatgccttcatctgttcagtcatctccaaaaacagtaaaaataaccactttttgttgggcaatatgaaatttttaaaggagtagaataccaaatgatagaaacagactgcctgaattgagaattttgatttcttaaagtgtgtttctttctaaattgctgttccttaatttgattaatttaattcatgtattatgattaaatctgaggcagatgagcttacaagtattgaaataattactaattaatcacaaatgtgaagttatgcatgatgtaaaaaatacaaacattctaattaaaggctttgcaacac

SEQ ID NO: 402 - DNA, 1541 bp, HUMAN
gttgtgctgtcagtgcaccagagacacaaggcttgaagctctgtcctgggaaaatatggcaaacagtgcctctcctgaacagaatcaaaatcactgttcagccatcaacaacagcatcccactgatgcagggcaacctccccactctgaccttgtctggaaagatccgagtgacggttactttcttcctttttctgctctctgcgacctttaatgcttctttcttgttgaaacttcagaagtggacacagaagaaagagaaagggaaaaagctctcaagaatgaagctgctcttaaaacatctgaccttagccaacctgttggagactctgattgtcatgccactggatgggatgtggaacattacagtccaatggtatgctggagagttactctgcaaagttctcagttatctaaagcttttctccatgtatgccccagccttcatgatggtggtgatcagcctggaccgctccctggctatcacgaggcccctagctttgaaaagcaacagcaaagtcggacagtccatggttggcctggcctggatcctcagtagtgtctttgcaggaccacagttatacatcttcaggatgattcatctagcagacagctctggacagacaaaagttttctctcaatgtgtaacacactgcagtttttcacaatggtggcatcaagcattttataactttttcaccttcagctgcctcttcatcatccctcttttcatcatgctgatctgcaatgcaaaaatcatcttcaccctgacacgggtccttcatcaggacccccacgaactacaactgaatcagtccaagaacaatataccaagagcacggctgaagactctaaaaatgacggttgcatttgccacttcatttactgtctgctggactccctactatgtcctaggaatttggtattggtttgatcctgaaatgttaaacaggttgtcagacccagtaaatcacttcttctttctctttgcctttttaaacccatgctttgatccacttatctatggatatttttctctgtgattgatagactacacaagaagtcatatgaagaagggtaaggtaatgaatctctccatctgggaatgattaacacaaatgttggagcatgtttacatacaaacaaagtaggatttacacttaagttatcattcttttagaaactcagtcttcagagcctcaattattaaggaaaagctcttcaggaaaaatactaaaatatttctcttcctcataagcttctaaattaatctctgccttttctgacctcatataacacattatgtaggtttcttatcactttctctttgcataataatgtactaatatttaaaataccttcagcctaaggcacaaggatgccaaaaaaacaaaggtgagaaaccacaacacaggtctaaactcagcatgctttggtgagtttttctccaaaaggggcatattagcaattagagttgtatgctatataatacatagagcacagagccctttgcccataatatcaactttccctcctatagtt

SEQ ID NO: 403 - DNA, 1547 bp, HUMAN
ggggacttcttgaacttgcagggagaataacttgcgcaccccactttgcgccggtgcctttgccccagcggagcctgcttcgccatctccgagccccaccgcccctccactcctcggccttgcccgacactgagacgctgttcccagcgtgaaaagagagactgcgcggccggcacccgggagaaggaggaggcaaagaaaaggaacggacattcggtccttgcgccaggtcctttgaccagagtttttccatgtggacgctctttcaatggacgtgtccccgcgtgcttcttagacggactgcggtctcctaaaggtcgaccatggtggccgggacccgctgtcttctagcgttgctgcttccccaggtcctcctgggcggcgcggctggcctcgttccggagctgggccgcaggaagttcgcggcggcgtcgtcgggccgcccctcatcccagccctctgacgaggtcctgagcgagttcgagttgcggctgctcagcatgttcggcctgaaacagagacccacccccagcagggacgccgtggtgcccccctacatgctagacctgtatcgcaggcactcaggtcagccgggctcacccgccccagaccaccggttggagagggcagccagccgagccaacactgtgcgcagcttccaccatgaagaatctttggaagaactaccagaaacgagtgggaaaacaacccggagattcttctttaatttaagttctatccccacggaggagtttatcacctcagcagagcttcaggttttccgagaacagatgcaagatgctttaggaaacaatagcagtttccatcaccgaattaatatttatgaaatcataaaacctgcaacagccaactcgaaattccccgtgaccagacttttggacaccaggttggtgaatcagaatgcaagcaggtgggaaagttttgatgtcacccccgctgtgatgcggtggactgcacagggacacgccaaccatggattcgtggtggaagtggcccacttggaggagaaacaaggtgtctccaagagacatgttaggataagcaggtctttgcaccaagatgaacacagctggtcacagataaggccattgctagtaacttttggccatgatggaaaagggcatcctctccacaaaagagaaaaacgtcaagccaaacacaaacagcggaaacgccttaagtccagctgtaagagacaccctttgtacgtggacttcagtgacgtggggtggaatgactggattgtggctcccccggggtatcacgccttttactgccacggagaatgcccttttcctctggctgatcatctgaactccactaatcatgccattgttcagacgttggtcaactctgttaactctaagattcctaaggcatgctgtgtcccgacagaactcagtgctatctcgatgctgtaccttgacgagaatgaaaaggttgtattaaagaactatcaggacatggttgtggagggttgtgggtgtcgctagtacagcaaaattaaatacataaatatatatata

SEQ ID NO: 404 - DNA, 4341 bp, HUMAN
gaattccggacccggtaggagggggcggggccgggggagaaggcgccgcctccgccccttcgggacccggagggtgcccttgtttacctcccagtatttgtcacccgagacaaagagggaaggaaggaggagccttctgagggaaactccctcggcgggaagcatcttactttcagaacgttttttaacaccctacggacgcgggaacggttccctcccggccccccgcgccctttccgaggttccctgccttgacttccccgagttctacgacaacctcagcgacagcgggaggagctgggcaatcggttttgcagggcaaactccaggctctcctcatttattattctctgggcggcgcacgggagaccctgcagggcaacagagcagagcgactacagctcccaggagccaacgctgcagggctgagccgacgcgggggacagacaggacctaaatggtggtcggaggaagggcaaggcagacctcttctgttaccttagcgccagcaaaccgagccgccgccgtcgccaagccaggagaccaacccccagtctcccgactaagtatttttaaatctggcggggctttccttcccgagccaaccactcccaccgtttacagccccaaccagtcagcgtgaggcccgccatttttcaaaccctcttcccgccgccaatcaggatcgagcagtacattcctctcctgaccggttctaacgggtctgggagttaacgacctgggcgacccaccgaacctgctaggctggggcgtggagggcgggtctggtaagacactgaccaatcgttagcctccgtggcaagggggcggggactatctgggtttgaataatcgtcagaaccaatcagattagtggggatgtggcccgtggcctagctcgtcaagttgccgtggcgcggagaactctgcaaaacaagaggctgaggattgcgttagagataaaccagttcacgccggagccccgtgagggaagcgtctccgttgggtccggccgctctgcgggactctgaggaaaagctcgcaccaggcaagaataccctccaataccctcgggttcgtggacctgcctttccccattccctcagagcctctactcggtctcggcgcagtggctctcggggtctgacccggcgagcggcatttggggtgcgggccggcgagggctgggtctgtggagggccggcgggcagtcggaggaggcggaaactgcccctgaccgggcccggttctgggagttttcaatgtcggtcacgaggtgcttagcggttaagtgaggctcgcgacgtgggagctgggggacatttctgtcaggaaaggcgttttgagggcgcttgcggagtcaccggactcggtgaagggtgggcggcggcgtctcgggccccgggagccacttgctgggctgagccgcggccgctcgggccgggaggaggaggaggaggagggtgtgcgccggggcgcgggcgggggcgcggcggccgcccttgggaggacgccctcgggaggaggggggcgcgggcagggcgggagcggatttgggcgggaagcggagccccgccagcgcccgccctggcagctgcggcgtccgcgccgacctccggcttcccctctcccccctcggccccgtcaggtggacgcggatctgtcaacatgggtaaaggagaccccaacaagccgcggggcaaaatgtcctcgtacgccttcttcgtgcagacctgccgggaagagcacaagaagaaacacccggactcttccgtcaatttcgcggaattctccaagaagtgttcggagagatggaaggtgaggcaggagagggacggagctcagggggtgcaggtgtggttttcggctaggagggccttaggcaggtagtaggcaactcatgagcttcaactttgccaccccagtgactcacctgaatatcttaagagttccaggcagacgattttaggtttttacttatataagacttcgaaagcaaaatgctgttaaggaaaatgtggtccttaaagatgatcttgtcgtctttggatgtttataggtaacaattttgctgtatttttggctcttattttatgtccacagaccatgtctgcaaaggagaagtcgaagtttgaagatatggcaaaaagtgacaaagctcgctatgacagggagatgaaaaattacgttcctcccaaaggtgataagaaggggaagaaaaaggaccccaatgctcctaaaaggccaccgtaagtttaaaataacccaaattgctccttggatttttccttcagtttattaaactctgttgcttcctttcagatctgccttcttcctgttttgctctgaacatcgcccaaagatcaaaagtgaacaccctggcctatccattggggatactgcaaagaaattgggtgaaatgtggtctgagcagtcagccaaagataaacaaccatatgaacagaaagcagctaagctaaaggagaaatatgaaaaggtacagtgtcatcttttttaaagccgtggataagactaggtataggtaataactgtagaaaacctgggaaatttagttaatcttgtattaatggttgtcagctatgttttgaaaaggcctaatgaaaattgtacacttcaacacaaggtaattgaaaccttccttttgactgaaaccagtgtttgtagcactagtatattcctgcagacagacttgtagttacttgtagttattgtatagtctgtatagtctgttatttttttttttaagcagagagtcaaagaaattgttttatgtagatatatataaaatgtgaaggtacaggagggactatggcactgtgtgtgatgtaaaagggtattggtagtgaaagtactgatactgctgtatcgcaacccttgtcattttacgtcattaacttgttaaagcctagtgggataagtgctctaaaaacttagactggttacctttttagacagttattagggttattggtcaatcatcttagattgtttacaactaagtggtttttcacagttgagtaatgataccggatgctttatttttttgacaatatttcaggatattgctgcatatcgtgccaagggcaaaagtgaagcaggaaagaagggccctggcaggccaacaggctcaaagaagaagaacgaaccagaagatgaggaggaggaggaggaagaagaagatgaagatgaggaggaagaggatgaagatgaagaataaatggctatcctttaatgatgcgtgtggaatgtgtgtgtgtgctcaggcaattattttgctaagaatgtgaattcaagtgcagctcaatactagcttcagtataaaaactgtacagatttttgtatagctgataagattctctgtagagaaaatacttttaaaaaatgcaggttgtagctttttgatgggctactcatacagttagattttacagcttctgatgttgaatgttcctaaatatttaatggtttttttaatttcttgtgtatggtagcacagcaaacttgtaggaattagtatcaatagtaaattttgggttttttaggatgttgcatttcgtttttttaaaaaaaattttgtaataaaattatgtatattatttctattgtctttgtcttaatatgctaagttaattttcactttaaaaaagccatttgaagaccagagctatgttgatttttttcggtatttctgcctagtagtagttcttagacacagttgacctagtaaaatgtttgagaattaaaaccaaacatgctcatatttgcaaaatgttctttaaaagttacatgttgaactcagtgaactttataagaatttatgcagttttacagaacgttaagttttgtacttgacgtttctgtttattagctaaattgttcctcaggtgtgtgtatatatatatacatatatatatatatatatatgtatatatatacacatatatacgtatatatacatatatatgtatatggagtctcactctgttgcccaggctggagtgcagtggcacgatcccagctcactgcaacctccgcctcccgggttcaagcgattcttctgcctcagcctccctggtagctggggctacagccatgtgccaccaagcccagctaatttatatttttagtagagacagggtttcaccatgttggtgaggctggtctggaactgacctcaaatgatctgcccacctcagcctcccaaagtgttgggattaacaggtgtgagccaccacgcctgtcccagtatattgtttaacaagtttattttgggtgaaaaattctctttaatgggaagaagaggggctagaatgtgaattc

SEQ ID NO: 405 - DNA, 503 bp, HUMAN
gacagcggcttccttgatccttgccacccgcgactgaacaccgacagcagcagcctcaccatgaagttgctgatggtcctcatgctggcggccctctcccagcactgctacgcaggctctggctgccccttattggagaatgtgatttccaagacaatcaatccacaagtgtctaagactgaatacaaagaacttcttcaagagttcatagacgacaatgccactacaaatgccatagatgaattgaaggaatgttttcttaaccaaacggatgaaactctgagcaatgttgaggtgtttatgcaattaatatatgacagcagtctttgtgatttattttaactttctgcaagacctttggctcacagaactgcagggtatggtgagaaaccaactacggattgctgcaaaccacaccttctctttcttatgtctttttactacaaactacaagacaattgttgaaacctgctatacatgtttattttaataaattgatggca

SEQ ID NO: 406 - DNA, 1694 bp, HUMAN
gggccggctcgcgggcgctgccagtctcgggcggcggtgtccggcgcgcgggcggcctgctgggcgggctgaagggttagcggagcacgggcaaggcggagagtgacggagtcggcgagcccccgcggcgacaggttctctacttaaaagacaatgactactgatgaaggtgccaagaacaatgaagaaagccccacagccactgttgctgagcagggagaggatattacctccaaaaaagacaggggagtattaaagattgtcaaaagagtggggaatggtgaggaaacgccgatgattggagacaaagtttatgtccattacaaaggaaaattgtcaaatggaaagaagtttgattccagtcatgatagaaatgaaccatttgtctttagtcttggcaaaggccaagtcatcaaggcatgggacattggggtggctaccatgaagaaaggagagatatgccatttactgtgcaaaccagaatatgcatatggctcggctggcagtctccctaaaattccctcgaatgcaactctcttttttgagattgagctccttgatttcaaaggagaggatttatttgaagatggaggcattatccggagaaccaaacggaaaggagagggatattcaaatccaaacgaaggagcaacagtagaaatccacctggaaggccgctgtggtggaaggatgtttgactgcagagatgtggcattcactgtgggcgaaggagaagaccacgacattccaattggaattgacaaagctctggagaaaatgcagcgggaagaacaatgtattttatatcttggaccaagatatggttttggagaggcagggaagcctaaatttggcattgaacctaatgctgagcttatatatgaagttacacttaagagcttcgaaaaggccaaagaatcctgggagatggataccaaagaaaaattggagcaggctgccattgtcaaagagaagggaaccgtatacttcaagggaggcaaatacatgcaggcggtgattcagtatgggaagatagtgtcctggttagagatggaatatggtttatcagaaaaggaatcgaaagcttctgaatcatttctccttgctgcctttctgaacctggccatgtgctacctgaagcttagagaatacaccaaagctgttgaatgctgtgacaaggcccttggactggacagtgccaatgagaaaggcttgtataggaggggtgaagcccagctgctcatgaacgagtttgagtcagccaagggtgactttgagaaagtgctggaagtaaacccccagaataaggctgcaagactgcagatctccatgtgccagaaaaaggccaaggagcacaacgagcgggaccgcaggatatacgccaacatgttcaagaagtttgcagagcaggatgccaaggaagaggccaataaagcaatgggcaagaagacttcagaaggggtcactaatgaaaaaggaacagacagtcaagcaatggaagaagagaaacctgagggccacgtatgacgccacgccaaggagggaagagtcccagtgaactcggcccctcctcaatgggctttcccccaactcaggacagaacagtgtttaatgtaaagtttgttatagtctatgtgattctggaagcaaatggcaaaaccagtagcttcccaaaaacagcccccctgctgctg

SEQ ID NO: 407 - DNA, 2208 bp, HUMAN
  misc_feature (1)..(2208): N=any base
atgccagggaagcccaagcacttgggtgtccccaacgggcgcatggttctggctgtctcagatggagaactgaccagcactgcaggttcccaggcccagggtgagggcagaggcagctctctcagcatccacagcctccctagtggccccagcagccccttctccaccgaggagcagcctgtggccagctgggcccagtcctttgagcggctgctgcaagacccacggggtctggcttacttcactgagttcctgaagaaggaattcagcgcagagaacgtaactttctggaaagcctgcgaacgtttccagcagatcccagccagcgacaccaagcagctagctcaggaggcccacaacatctaccacgagttcctatccagccaggcgctgagcccagtgaacatcgaccgacaggcctggcttagtgaggaggtgctggcccagccccggccagatatgttccgagcacagcagcttcagatcttcaatttgatgaagttcgacagctatgcgcgcttcgtcaaatccccgctgtaccaagagtgcctgctggcggaggccgagggacgccccctgcgggaacctggctcctcacacctcgggagcccggacacagcgaggaagaagccaaagctgaagcctgggaagtcactgccgctgggcgtggaagagttggggcagctgccactcgctgagggcccttgtggccgccctctccgcaagtcctttcgtagagagatgacaggtggagccatgaattcggccctgcgacgagagtctcaagggtccctgaattcttctgccagtctggacctgggtttccttgcctttgtgagcagcaaatctgagagtcaccggaagagccttggaagtggagagagtgagagcgagagtcggccggggaagtattgctgcgtgtatctacctgacggcacggcttccttggccctggctcgacctggcctcaccatccgagacatgctggcaggcatctgtgagaagagaggcctctctctgcctgacattaaggtctacctggtgggcaatgaacagaaggccctggtcctggatcaggattgcaccgtgctggcagaccaggaagtgcgactggaaaacaggatcaccttccagctggagttggtcggcctggagcgagtggtccggatctcagctaagcccaccaagcgtctgcaagaggcgctgcagcccatcctggctaagcatggcctgagcctggaccaggtggtactgcacaggccaggagagaagcagcccatggatttggagactccagtgagctcagtggcctcacagacactggttttggacactcctccggatgcaaagatgagtgaagccagaagcatatccccctgccgcagtcagggatgcctcccaagaacccagaccaaggacagtcaccttcccccatcgtcctccagtttgctggtagaagatgccagtagttctactgggaaccggcagacctgtgacattgaaggcctggtggagctgctgaatcgggtgcagagcagcggggcccacgatcagagaggacttcttcgcaaagaggacctggtccttccagaatttctgcagcttccttcccaaagaccaggctctcgggaggctccaccatagactgaatcaactattcagcccagggaggcccttcagactccaccacccacccggtcctctggcatctgtgtaacaatccaggctatctgcatggtgcctgggcaaaccaagcatgccacgggtctgtgctgcatgccctatctgtaccatgagtgtctttggctcctttctgctatgggcaggcnnccagaaagggccaggaggggggggctaactgttctctcataggtttgcctacccattcctcccagtaggccatcaagaggaggtgggcctagttccttggcataagcatagtgaacacaaatgggtgactttggcagtgccagcctcctcaacttgttctaggctttagcagggggcaggaaggaggggctggcccctccttaaagagttgatataagtaagacctgggtgtactggtgagcaacccctccctccatccacagactctactgtacatatggattttatggttggcttggggcagctgggtttgtcctggatatatggtactgttatataataataataattatcattattaaaaaaaaagctcgacca

SEQ ID NO: 408 - DNA, 367 bp, HUMAN
ctccaccatgaaactcgctgtcaccctcaccctggtcacactggctctctgctgcagctccgcttctgcagagatctgcccgagctttcagcgtgtcatcgaaaccctcctcatggacacaccctccagttatgaggctgccatggaacttttcagccctgatcaagacatgagggaggcaggggctcagctgaagaagctggtggacaccctcccccaaaagcccagagaaagcatcattaagctcatggaaaaaatagcccaaagctcactgtgtaattagcatttagaagctgaagatccccaactgctccagcctctgccgctgccatgctttgagtccacgcccaccagccttgctctcttc

SEQ ID NO: 409 - DNA, 3038 bp, HUMAN
gcgtgaggaaagtaccaaacagcagcggagttttaaactttaaatagacaggtctgagtgcctgaacttgccttttcattttacttcatcctccaaggagttcaatcacttggcgtgacttcactacttttaagcaaaagagtggtgcccaggcaacatgggtgactggagcgccttaggcaaactccttgacaaggttcaagcctactcaactgctggagggaaggtgtggctgtcagtacttttcattttccgaatcctgctgctggggacagcggttgagtcagcctggggagatgagcagtctgcctttcgttgtaacactcagcaacctggttgtgaaaatgtctgctatgacaagtctttcccaatctctcatgtgcgcttctgggtcctgcagatcatatttgtgtctgtacccacactcttgtacctggctcatgtgttctatgtgatgcgaaaggaagagaaactgaacaagaaagaggaagaactcaaggttgcccaaactgatggtgtcaatgtggacatgcacttgaagcagattgagataaagaagttcaagtacggtattgaagagcatggtaaggtgaaaatgcgaggggggttgctgcgaacctacatcatcagtatcctcttcaagtctatctttgaggtggccttcttgctgatccagtggtacatctatggattcagcttgagtgctgtttacacttgcaaaagagatccctgcccacatcaggtggactgtttcctctctcgccccacggagaaaaccatcttcatcatcttcatgctggtggtgtccttggtgtccctggccttgaatatcattgaactcttctatgttttcttcaagggcgttaaggatcgggttaagggaaagagcgacccttaccatgcgaccagtggtgcgctgagccctgccaaagactgtgggtctcaaaaatatgcttatttcaatggctgctcctcaccaaccgctcccctctcgcctatgtctcctcctgggtacaagctggttactggcgacagaaacaattcttcttgccgcaattacaacaagcaagcaagtgagcaaaactgggctaattacagtgcagaacaaaatcgaatggggcaggcgggaagcaccatctctaactcccatgcacagccttttgatttccccgatgataaccagaattctaaaaaactagctgctggacatgaattacagccactagccattgtggaccagcgaccttcaagcagagccagcagtcgtgccagcagcagacctcggcctgatgacctggagatctagatacaggcttgaaagcatcaagattccactcaattgtggagaagaaaaaaggtgctgtagaaagtgcaccaggtgttaattttgatccggtggaggtggtactcaacagccttattcatgaggcttagaaaacacaaagacattagaatacctaggttcactgggggtgtatggggtagatgggtggagagggaggggataagagaggtgcatgttggtatttaaagtagtggattcaaagaacttagattataaataagagttccattaggtgatacatagataagggctttttctccccgcaaacacccctaagaatggttctgtgtatgtgaatgagcgggtggtaattgtggctaaatatttttgttttaccaagaaactgaaataattctggccaggaataaatacttcctgaacatcttaggtcttttcaacaagaaaaagacagaggattgtccttaagtccctgctaaaacattccattgttaaaatttgcactttgaaggtaagctttctaggcctgaccctccaggtgtcaatggacttgtgctactatatttttttattcttggtatcagtttaaaattcagacaaggcccacagaataagattttccatgcatttgcaaatacgtatattctttttccatccacttgcacaatatcattaccatcactttttcatcattcctcagctactactcacattcatttaatggtttctgtaaacatttttaagacagttgggatgtcacttaacattttttttttttgagctaaagtcagggaatcaagccatgcttaatatttaacaatcacttatatgtgtgtcgaagagtttgttttgtttgtcatgtattggtacaagcagatacagtataaactcacaaacacagatttgaaaataatgcacatatggtgttcaaatttgaacctttctcatggatttttgtggtgtgggccaatatggtgtttacattatataattcctgctgtggcaagtaaagcacactttttttttctcctaaaatgtttttccctgtgtatcctattatggatactggttttgttaattatgattctttattttctctcctttttttaggatatagcagtaatgctattactgaaatgaatttcctttttctgaaatgtaatcattgatgcttgaatgatagaattttagtactgtaaacaggctttagtcattaatgtgagagacttagaaaaaatgcttagagtggactattaaatgtgcctaaatgaattttgcagtaactggtattcttgggttttcctacttaatacacagtaattcagaacttgtattctattatgagtttagcagtcttttggagtgaccagcaactttgatgtttgcactaagattttatttggaatgcaagagaggttgaaagaggattcagtagtacacatacaactaatttatttgaactatatgttgaagacatctaccagtttctccaaatgccttttttaaaactcatcacagaagattggtgaaaatgctgagtatgacacttttcttcttgcatgcatgtcagctacataaacagttttgtacaatgaaaattactaatttgtttgacattccatgttaaactacggtcatgttcagcttcattgcatgtaatgtagacctagtccatcagatcatgtgttctggagagtgttctttattcaataaagttttaatttagtataaacat

SEQ ID NO: 410 - DNA, 597 bp, HUMAN
atgaaggctgtcattattctggggcttgtcctcctttctgtcacggtccagggcaagatctttgaaaggtgtgagttggccagaactctgaaaagattgggactggatggctacaggggaatcagcctagcaaactgggtgtgtttggccaaatgggagagtaattataacacacaagctacaaactacaatcctggagaccaaagcactgattatgggatatttcagatcaatagccactactggtgtaataatggcaaaaccccaggagcagttaatgcctgtcatatatcctgcaatgctttgctgcaagataacatcgctgatgctgtaacttgtgcaaagagggttgtcagtgatccacaaggcattagagcatgggtggcatggagaaatcactgtcaaaacagagatgtcagtcagtatgttcaaggttgtggagtgtaattgcagaattttccttcttcagctcattttcgtctctttctcacattaagggagtagtaattaagtgaaagatcacactaccattatttccccttcaaagaatatatttacagagcaggagcaaaatatggcttcttctagagacgtatg

SEQ ID NO: 411 - DNA, 1446 bp, HUMAN
ctcggaaggacaggatgccatgccatcgggaagacaggactccccaaggagaacaggatgccatcagggagacaggactcccccgtggaagataggatacctccaggaagacagaatgccccccaggcagccctgggacagcgggaaacactagggaccaagctatccctggttcactcgggattttgttgggttgtgggcggggctcaggaaagattgtccctgctggtcctgctccacgaccacccacccggcaaggttccctcctagagaaccttgtcagagacagaacgggtccccacaggcgcattcttctttccaacacccatggcgcagttcctgagactttgcatctggctcgtagcgcttgggtcctgcctcctggctacagtgcaggcagactgcagccaggactgcgctaaatgcagctaccgcctggtacgtcccggcgacatcaacttcctggcatgcacactcgaatgtgaagggcagctgccttctttcaaaatctgggagacctgcaaggatctcctgcaggtgtccaagcccgagttcccttgggataacatcgacatgtacaaagacagcagcaaacaggatgagagccacttgctagccaagaagtatggagggttcatgaaacggtatggaggcttcatgaagaagatggatgagctttaccccgtggagccagaagaagaggccaatggaggcgagatccttgccaagaggtatggcggtttcatgaagaaggatgcagatgagggagacaccttggccaactcctccgacctgctgaaagagctactgggaacaggagacaaccgtgcgaaagatagccaccaacaggaaagcaccaacaatgatgaagacagcacgagcaagaggtatgggggcttcatgagaggcctcaaaagaagcccccagctggaagacgaagcaaaggagctgcagaagcgctatgggggcttcatgagaagggtcgggcgccccgagtggtggatggactatcagaagagatacggaggcttcctgaagcgctttgctgagtctctaccctcggatgaagaaggcgaaagttactctaaagaagttcccgagatggaaaaaagatacggaggctttatgcggttttgaagcccttcccagcagtgatcccgggcccccactagcctgctccatcccccgtgagcaactgccccatcagtgatgtttcttgtcatgtgctgcttgtgctgtacagttgccctcgtggtctggataactgctgcctgaaagctgtgatttttagggggttgtctgtattcttttgagtcttgaagctcagtattggtctcttgtggctatgttatcatgctgaaacagtctgttacctcatcccttctgacaaaacgtcaataaatgcttatttgtatataaaaataataaacccgtgaacccaactgc

SEQ ID NO: 412 - DNA, 216 bp, HUMAN
aagagaaccagacccatgtttatccctttgaaagaaacctgaaccaagccattcctctggactgttcttccatccactggaccaataactcatagtttgaaggatttttacttaatggaagtgagaaaacagccagatcaaaagaatttccaggagccaagacagaaaacatgcagagcattagacagcctaaatggagctggctagatatgactc

SEQ ID NO: 413 - DNA, 269 bp, HUMAN
tggacagcctggccggctggaagccctccgtgtactacgtcatgctgatcctatgcacagcctccatcctcatctcttgctgcgcctcagccatgtacacccccattgaaggctggagctactttgactcactctacttctgttttgtggctttcagcaccattggctttggggacctggtcagcagccagaacgcccactatgagagccaaggcctctatcgctttgccaacttcgtcttcatcctcatgggtgtctgctgcatctac

SEQ ID NO: 414 - DNA, 134 bp, HUMAN
ctcacctggtgcaggtggacacctgcgcaggtgtgtgccctccggcccctgaagcatggccagcagcggcatggctgacagcgccaaccacctgcccatctttttcggcaacatcacccgggaggaggcagaag

SEQ ID NO: 415 - DNA, 105 bp, HUMAN
  misc_feature (1)..(105): N=any base
cngncattgcagtanatnnagctcnatagaganatcgccgttggcaattgagtatgcggacgggnactgtgncgactctgtgcctcgctgaggaaaaataactaa

SEQ ID NO: 416 - DNA, 222 bp, HUMAN
ctgggttcccgagtgcttgagctgtggctcccgctgtagctctgaccacgtggaaactcaagcctgcactcgggaacagaaccgcatctgcacctacaggcccggctggtactgcgcgctgagcaagcaggaggggtgccggctgtgcgcgccgctgcgcaagtgccgcccgggcttcggcgtggccagaccaggaactgaaacatcagaactggtgtgcaa

SEQ ID NO: 417 - DNA, 127 bp, HUMAN
gggagtccgctccagcggggcgctccagtccctcagacgtgggctgagcttgggacgagctgcgttccgccccaggccactgtagggaacggcggtggcgcctccccagcaaaccggaccgactggg

SEQ ID NO: 418 - DNA, 181 bp, HUMAN
ggcttcaccatgcacagctgggagcgcctggcagttctggtcctcctagtgagcggccgcctgcgcgggccgccccgtggtcggatcctgggcggcagaaaaggccaagggcgcacgcgcggccctacatggcgtcggtgcagctgaacggcgcgcacctgtgcggcggcgtcctggtggc

SEQ ID NO: 419 - DNA, 225 bp, HUMAN
ctccgactggacgcagcagccaccgacgcgtccctctctccacgaggctgccggcttaggacccccagctccgacatgtcggcctctggtcggctgtgtcttctcaacatcgttggactgattctccccaccagaggacagacgttgaaagataccacgtccagttcttcagcagacgcaactatcatggacattcaggtcccgacacgagccccagatgcagtc

SEQ ID NO: 420 - DNA, 476 bp, HUMAN
  misc_feature (1)..(476): N=any base
gactattacaaaagtttatttaacaaaaagtctaatatgaaaatgtacatgacctaatttttacatcatagtaaaacaggccctatggagagaggacatgggtttctctgctgaacagccattatttatactcgttccaaggcttctaacatgatgatactatttcctcgtattaccaccattccaatattgttctgttgtccactagtcgccatctccacacattcatctatcacaaggttcataaagggatcaaatccccgcaatattccttggacatgtctgccaccatttaatttcaatgataacttcttgtccataaattttttcaactcggggagggtgagctttgctcatnggtgtatactccgcgggctcacagatgcctttggaacgcaacgcacggctttcctcacgctcccgctgtaggcccggcgtcttgccctcgtgccgaatttcttggccccganggcaaa

SEQ ID NO: 421 - DNA, 424 bp, HUMAN
  misc_feature (1)..(424): N=any base
caaggtcctggtgatcactgtcttctgtggtctgactgtggctttccccctgtcagaattagtttcaatcaataaagaactacagaattcaatcattgacctactaaactcagtctttgaccaactgggatcatacagagggacaaaagctcctctagaggattatacagatgatgatttaagcactgactctgagcagatcatggacttcacgccagccgcaaacaaacagaattctgagttctctactgatgttgagacagtctcctccggctttctggaagaattcactngagaacacagacatcacagtgaaaattccattagctgggaatccagtctcccctacttcctgagaagactccaactttgaaataaacctgcgactgccattcaggatattgtctttgtagaaaatgatata

SEQ ID NO: 422 - DNA, 341 bp, HUMAN
  misc_feature (1)..(341): N=any base
gggggtgttcggtccttgcgggcttcacgagatcgattcctgactactttgctgtgaattgcacaactcacacagtaatgtagcttcacatacagcttgggaagcacataggcatcgaagacgctcgcttcagaaatgtccctgactgctgcggcctccactatgtttcgaatgaccgaatttcttaatgggccttgtccttgggcacggcatcggggcacagttaagtgcagcgaataaggctgcacgtgggccgcgggcccttttttggcacgaccaattgttccttccttttccttggcaatcttgaaggaacgaaccgaagagaggaagacggtgcn

SEQ ID NO: 423 - DNA, 151 bp, HUMAN
  misc_feature (1)..(151): N=any base
ccagaccccaagccngggccatcccgccactcgacgggtggtgctcgngacggcgtgcanntcccgcccggggactacagcacgacncccggcggcacntcattcagcaccaccccggggangtaccaggatcatctatgaccggaaattc

SEQ ID NO: 424 - DNA, 442 bp, HUMAN
ggctcggcgcgatggaggaggagacgcatactgacgccaaaatccgtgctgaaaatggaacagggtccagccctcggggtcctggctgcagcctccggcactttgcctgcgaacagaacctgctgtcgcggccagatggctctgcttccttcctgcaaggtgacacctctgtcctggcgggtgtgtacgggccggccgaggtgaaggtcagcaaagagattttcaacaaggccacactcgaagtgatcctgaggccgaagattgggctgcctgcatggcattggtggatgcaggtgtgcccatgcgggctctcttctgtggggtcgcctgcgccctggactctgatgggaccctcgtgctggatcctacatccaagcaagaaaaggaggcccgggcagtcctgacctttgccctggacagcgtggaacgaagctgctgatgt

SEQ ID NO: 425 - DNA, 446 bp, HUMAN
tttttttttgagagattaagattcttttaatggtgaaaagatatacatatatttggaactagccagcttgactcagtttaggtgatcccaattttggtggcaacaaccaaagcatcgtagtcaggagccagtcgaacatatgccttcctctctccatcagactgaatcagagtgttgactttggccacatcaatgtcacaaacttcttcacagcctgtttgatctggtgcttgttggctttaacatccacagtgaacacaagtaggctgttgttttctatcttcttcacagcctactcagtggtcagcggaaacttgatgataacatggtggtcaagcttatttctcctgggggtgctcttccaaggatatttgggctgcctccggagtcacagtgtcttgggccgccggaaggtgggtgacatgtggatcttgttttttttgtgg

SEQ ID NO: 426 - DNA, 3074 bp, HUMAN
ccgctctccgctgcgggggaggccatggcggaaccttcccaggccccgaccccggccccggctgcgcagccccggccccttcagtccccagcccctgccccaactccgactcctgcacccagcccggcttcagccccgattccgactcccaccccggcaccagcccctgccccagctgcagccccagccggcagcacagggactggggggcccggggtaggaagtgggggggccgggagcgggggggatccggctcggcctggcctgagccagcagcagcgcgccagtcagaggaaggcgcaagtccgggggctgccccgcgccaagaagcttgagaagctaggggtcttctcggcttgcaaggccaatggaacctgtaagtgtaatggctggaaaaaccccaagccccccactgcaccccgcatagatctgcagcagccagctgccaacctgagtgagctgtgccgcagttgtgagcaccccttggctgaccacgtatcccacttggagaatgtgtcagaggatgagataaaccgactgctggggatggtggtggatgtggagaatctcttcatgtctgttcacaaggaagaggacacagacaccaagcaggtctatttctacctcttcaagctactgcggaaatgcatcctgcagatgacccggcctgtggtggaggggtccctgggcagccctccatttgagaaacctaatattgagcagggtgtgctgaactttgtgcagtacaagtttagtcacctggctccccgggagcggcagacgatgttcgagctctcaaagatgttcttgctctgccttaactactgggagcttgagacacctgcccagtttcggcagaggtctcaggctgaggacgtggctacctacaaggtcaattacaccagatggctctgttactgccacgtgccccagagctgtgatagcctcccccgctacgaaaccactcatgtctttgggcgaagccttctccggtccattttcaccgttacccgccggcagctgctggaaaagttccgagtggagaaggacaaattggtgcccgagaagaggaccctcatcctcactcacttccccaaattcctgtccatgctggaggaggagatctatggggcaaactctccaatctgggagtcaggcttcaccatgccaccctcagaggggacacagctggttccccggccagcttcagtcagtgcagcggttgttcccagcacccccatcttcagccccagcatgggtgggggcagcaacagctccctgagtctggattctgcaggggccgagcctatgccaggcgagaagaggacgctcccagagaacctgaccctggaggatgccaagcggctccgtgtgatgggtgacatccccatggagctggtcaatgaggtcatgctgaccatcactgaccctgctgccatgctggggcctgagacgagcctgctttcggccaatgcggcccgggatgagacagcccgcctggaggagcgccgcggcatcatcgagttccatgtcatcggcaactcactgacgcccaaggccaaccggcgggtgttgctgtggctcgtggggctgcagaatgtcttttcccaccagctgccgcgcatgcctaaggagtatatcgcccgcctcgtctttgacccgaagcacaagactctggccttgatcaaggatgggcgggtcatcggtggcatctgcttccgcatgtttcccacccagggcttcacggagattgtcttctgtgctgtcacctcgaatgagcaggtcaagggttatgggacccacctgatgaaccacctgaaggagtatcacatcaagcacaacattctctacttcctcacctacgccgacgagtacgccatcggctacttcaaaaagcagggtttctccaaggacatcaaggtgcccaagagccgctacctgggctacatcaaggactacgagggagcgacgctgatggagtgtgagctgaatccccgcatcccctacacggagctgtcccacatcatcaagaagcagaaagagatcatcaagaagctgattgagcgcaaacaggcccagatccgcaaggtctacccggggctcagctgcttcaaggagggcgtgaggcagatccctgtggagagcgttcctggcattcgagagacaggctggaagccattggggaaggagaaggggaaggagctgaaggaccccgaccagctctacacaaccctcaaaaacctgctggcccaaatcaagtctcaccccagtgcctggcccttcatggagcctgtgaagaagtcggaggcccctgactactacgaggtcatccgcttccccattgacctgaagaccatgactgagcggctgcgaagccgctactacgtgacccggaagctctttgtggccgacctgcagcgggtcatcgccaactgtcgcgagtacaaccccccggacagcgagtactgccgctgtgccagcgccctggagaagttcttctacttcaagctcaaggagggaggcctcattgacaagtaggcccatctttgggccgcagccctgacctggaatgtctccacctcggattctgatctgatccttagggggtgccctggccccacggacccgactcagcttgagacactccagccaagggtcctccggacccgatcctgcagctctttctggaccttcaggcacccccaagcgtgcagctctgtcccagccttcactgtgtgtgagaggtctcctgggttggggcccagcccctctagagtagctggtggccagggatgaaccttgcccagccgtggtggcccccaggcctggtccccaagagctttggaggcttggattcctgggcctggcccaggtggctgtttccctgaggaccagaactgctcattttagcttgagtgatggcttcaggggttggaagttcagcccaaactgaagggggccatgccttgtccagcactgttctgtcagtctcccccaggggtggggggtatggggaccattcattccctggcattaatcccttagagggaataataaagctttttatttctctg

SEQ ID NO: 427 - DNA, 757 bp, HUMAN
atgctggttctctttgtggccacatggagtgacctgggcctctgcaagaagcgcccgaagcctggaggatggaacactgggggcagccgatacccggggcagggcagccctggaggcaaccgctacccacctcagggcggtggtggctgggggcagcctcatggtggtggctgggggcagcctcatggtggtggctgggggcagccccatggtggtggctggggacagcctcatggtggtggctggggtcaaggaggtggcacccacagtcagtggaacaagccgagtaagccaaaaaccaacatgaagcacatggctggtgctgcagcagctggggcagtggtggggggccttggcggctacgtgctgggaagtgccatgagcaggcccatcatacatttcggcagtgactatgaggaccgttactatcgtgaaaacatgcaccgttaccccaaccaagtgtactacaggcccatggatgagtacagcagccagaacaactttgtgcacgactgcgtcaatatcacaatcaagcagcacacggtcaccacaaccaccaagggggagaacttcaccgagaccgacgttaagatgatggagcgcgtggttgagcagatgtgtatcacccagtacgagagggaatctcaggcctattaccagagaggatcgagcatggtcctcttctcctctccacctgtgatcctcctgatctctttcctcatcttcctgatagtgggatgaggaaggtcttcctgtt

SEQ ID NO: 428 - DNA, 468 bp, HUMAN
tttttgcagtttgaatcctggtttatttaagtagcattcaggagttatactgtaaataaacatcattatggctaatgactaattaaaatcaccattcattacaaataccaaccaggttagataatactattaactatcttttccccttcggtctggggttcatattcttccttttctggaagtcattttcatggataaaatatttagcattttttgttacctcttccttcaccaactgtactcaacacacttctgtaaacagagtgagaacctgggttcatggacaagctcttttccacttatcttcgggttaaaccaaaactttttcagcaactttgcccctgtccaagttttgcagaacaccagctgcctcttcctgttctaggcattctagggctagatacctgtgaacggacttcaagcattaaagaagtcatcagcatttcctatacctcacacacactcatt

SEQ ID NO: 429 - DNA, 330 bp, HUMAN
  misc_feature (1)..(330): N=any base
ttttttttccggtatccactggaagtttatttctttagggttctatcccaaccagtcgcttaaaaaccaagtaacacagacctgaggggtgggggctggggactgcacctccctcctactcatggtggacagcagtggggactagggaggggcaggagaggtggctgaagcaaggcagcagtaatggggccacgacgccacagagccagctccgtcctctcccagaccctggtgggagtccctgggtggtgaaaaaaggggggggaaancaccccaggccctncctctcccttccttaaacagcctcctttcgggctcaacccatttctt

SEQ ID NO: 430 - DNA, 273 bp, HUMAN
tttttaggatttttagtattttaatataatacagttccaatcagtgtgtctggttcatttcagttccttcactgccaaaccggggggcagggactgcttcagtttctctgccttctctttgtcagtgatgaccagggtgtaaaggtatctgctgcatcgaactttaaacttcacgttgtccttatttttcttgatcttgacagatttggcatcctttcgtcgggctgtgagcaggaagtccttgatttcctcaattttccgaggcatggcgac

SEQ ID NO: 431 - DNA, 616 bp, HUMAN
  misc_feature (1)..(616): N=any base
tgatgtaaaattcagctttattagaattctcttaaaatgtttgataatatacaagcagtctgactcccaatgctttgtgtcattatacaaataagaaaataacttgctttaattctaatgcagcattttttaacctgctaaatagaactaacttcttgtttctgaaatcctgaacatatgcctcattgaaataccattttcaggacatcgttttcccagcaaaaagcttctttagataacagaatcatttggtatacacagaacacgaatgatgactgcaaggggaggctgcagggctggaggagggttagagcaacacagtttccagttacagttgagtccgggaagccagcaccagaaagaggggaatgataagacccgccctttgttctgtataaagacttggggcttttctttgagtagcggctgctgccgactttaaggcacagtcaggatgggtgctgtggtccacgcactgtaagagcttcactggtcggtaatcattaatacagctgtactggaaacccatgtncttcagcctcttttnncagactntcatgctgncttccccgcaggattccacattgngtcccccaatnttcatgcatacccagat

SEQ ID NO: 432 - DNA, 216 bp, HUMAN
tttttatttcttcagctaaaacagcggaagaggggatttattatatggttgttacactcggccacaaataaacacagaaatagtccagaatgtcacaggtccagggcagaggaccaacatgggcattttgtttatgagcaaggtgggtctcagaggtgatcggcgatcagagggcgatgaagttctagatccattgagacaagctctagacagtag

SEQ ID NO: 433 - DNA, 534 bp, HUMAN
tccaaggggctgtttaagatggcggaggtgcatgtcctggtgcttgatggtcgaggccatctcctgggccgcctggcggccatcgtggctaaacaggtactgctgggccggaaggtggtggtcgtacgctgtgaaggcatcaacatttctggcaatttctacagaaacaagttgaagtacctggctttcctccgcaagcggatgaacaccaacccttcccgaggcccctaccacttccgggcctccagccgcatcttctggcggaccgtgcgaggtatgctgccccacaaaaccaagcgaggccaggccgctctggaccgtctcaaggtgtttgacggcatcccaccgccctacgacaagaaaaagcggatggtggttcctgctgccctcaaggtcgtgcgtctgaagcctacaagaaagtttgcctatctgcggcgcctggctcacgaggttggctggaagtaccaggcagcgacagccaccctgtaggagaagaggaaagagaaagccaagatccactaccggaagaagaac

SEQ ID NO: 434 - DNA, 434 bp, HUMAN
gaactatagcagatgaaataaaatatatatctgttaaatgtcagagagcaagttagacacacattccactaagcatcaaaggccctcgtagtctcggtggaaggacaaactccagctccacatcactggtttaagtttcttcctcttcttcttcctcttcttcctcctcctcttcctcctcatcttcatcagagctgaaggtgccatcagggaggctgtagacacggatgacctgcttgttggggtccttgaggatgaggtatttgccctcctccagcttcatgcagatgtcaatgacgcagcgtaaaatgccccaggcattctccacgctcaaggttgatctggctggcaaactcattaggcttgaactgctgggtgcctatgatgacctggcgtgaaagagtctttcaccgtggttaccgagacacataacc

SEQ ID NO: 435 - DNA, 655 bp, HUMAN
  misc_feature (1)..(655): N=any base
attataaaagtgtgctttattgtaaggaaaatttaaatataaccaacaatactgaaaataatgtacgtggcatttatagccttggtcaaagttctttattaaacaggcgtttgctgttccatgaatagttaacaattagtttatgcaacaaaatagataacttgaaaaagtgagtaagaatacagaatgatgaaccaggaatctggagttcttttgtgttttttcttgtttaacagacatggcttttaaaataaaatctgaaatataaaacaagtcatcttcatgtagagagctctcttttcctacaagaaggttttgcaaaaatgttaaacagtgttctaaaaatgtggctgaagttatactttacatactttaacttcttatatatacattatccaattaacattctaaccacattttcatatacaagtgggaccataaacattctctagtaagactacactagcacagagtaattttacccatgtatatatattcatttgaaacctgtttccaaaatgaaatcactcatttaaaagcaaacaactggttagaattaatgtctctagacactgggtcatggggcctagaaatcatgttagagtatatttgctttgttgaatattattaaattcatcttatgttgcancatact

SEQ ID NO: 436 - DNA, 428 bp, HUMAN
ttgggtaccaaatttctttatttgaaggaatggtacaaatcaaagaacttaagtggatgttttggtacaacttatagaaaaggtaaaggaaaccccaacatgcatgcactgccttggtgaccagggaagtcaccccacggctatggggaaattagcccgaggcttagctttcattatcactgtctcccagggtgtgcttgtcaaagagatattccgccaagccagattcgggcgctcccatcttgcgcaagttggtcacgtggtcacccaattctttgatggctttcacctgctcattcaggtaatgtgtctcaatgaagtcacacaaatgggggtcatttttgtcagtggccagtttgtgcagttccagtagtgactgattcacatttttttccaaatgtaatgcacactccattgcattcagcccg

SEQ ID NO: 437 - DNA, 1128 bp, HUMAN
agtccgagtggagagagcgagctgagtggttgtgtggtcgcgtctcggaaaccggtagcgcttgcagcatggctgaccaactgactgaagagcagattgcagaattcaaagaagctttttcactatttgacaaagatggtgatggaactataacaacaaaggaattgggaactgtaatgagatctcttgggcagaatcccacagaagcagagttacaggacatgattaatgaagtagatgctgatggtaatggcacaattgacttccctgaatttctgacaatgatggcaagaaaaatgaaagacacagacagtgaagaagaaattagagaagcattccgtgtgtttgataaggatggcaatggctatattagtgctgcagaacttcgccatgtgatgacaaaccttggagagaagttaacagatgaagaagttgatgaaatgatcagggaagcagatattgatggtgatggtcaagtaaactatgaagagtttgtacaaatgatgacagcaaagtgaagaccttgtacagaatgtgttaaatttcttgtacaaaattgtttatttgccttttctttgtttgtaacttatctgtaaaaggtttctccctactgtcaaaaaaatatgcatgtatagtaattaggacttcattcctccatgttttcttcccttatcttactgtcattgtcctaaaaccttattttagaaaattgatcaagtaacatgttgcatgtggcttactctggatatatctaagcccttctgcacatctaaacttagatggagttggtcaaatgagggaacatctgggttatgccttttttaaagtagttttctttaggaactgtcagcatgttgttgttgaagtgtggagttgtaactctgcgtggactatggacagtcaacaatatgtacttaaaagttgcactattgcaaaacgggtgtattatccaggtactcgtacactatttttttgtactgctggtcctgtaccagaaacattttcttttattgttacttgctttttaaactttgtttagccacttaaaatctgcttatggcacaatttgcctcaaaatccattccaagttgtatatttgttttccaataaaaaaattacaatttaccc

SEQ ID NO: 438 - DNA, 2133 bp, HUMAN
cgggagagcgcgctctgcctgccgcctgcctgcctgccactgagggttcccagcaccatgagggcctggatcttctttctcctttgcctggccgggagggccttggcagcccctcagcaagaagccctgcctgatgagacagaggtggtggaagaaactgtggcagaggtgactgaggtatctgtgggagctaatcctgtccaggtggaagtaggagaatttgatgatggtgcagaggaaaccgaagaggaggtggtggcggaaaatccctgccagaaccaccactgcaaacacggcaaggtgtgcgagctggatgagaacaacacccccatgtgcgtgtgccaggaccccaccagctgcccagcccccattggcgagtttgagaaggtgtgcagcaatgacaacaagaccttcgactcttcctgccacttctttgccacaaagtgcaccctggagggcaccaagaagggccacaagctccacctggactacatcgggccttgcaaatacatccccccttgcctggactctgagctgaccgaattccccctgcgcatgcgggactggctcaagaacgtcctggtcaccctgtatgagagggatgaggacaacaaccttctgactgagaagcagaagctgcgggtgaagaagatccatgagaatgagaagcgcctggaggcaggagaccaccccgtggagctgctggcccgggacttcgagaagaactataacatgtacatcttccctgtacactggcagttcggccagctggaccagcaccccattgacgggtacctctcccacaccgagctggctccactgcgtgctcccctcatccccatggagcattgcaccacccgctttttcgagacctgtgacctggacaatgacaagtacatcgccctggatgagtgggccggctgcttcggcatcaagcagaaggatatcgacaaggatcttgtgatctaaatccactccttccacagtaccggattctctctttaaccctccccttcgtgtttcccccaatgtttaaaatgtttggatggtttgttgttctgcctggagacaaggtgctaacatagatttaagtgaatacattaacggtgctaaaaatgaaaattctaacccaagacatgacattcttagctgtaacttaactattaaggccttttccacacgcattaatagtcccatttttctcttgccatttgtagctttgcccattgtcttattggcacatgggtggacacggatctgctgggctctgccttaaacacacattgcagcttcaacttttctctttagtgttctgtttgaaactaatacttaccgagtcagactttgtgttcatttcatttcagggtcttggctgcctgtgggcttccccaggtggcctggaggtgggcaaagggaagtaacagacacacgatgttgtcaaggatggttttgggactagaggctcagtggtgggagagatccctgcagaatccaccaaccagaacgtggtttgcctgaggctgtaactgagagaaagattctggggctgtcttatgaaaatatagacattctcacataagcccagttcatcaccatttcctcctttacctttcagtgcagtttcttttcacattaggctgttggttcaaacttttgggagcacggactgtcagttctctgggaagtggtcagcgcatcctgcagggcttctcctcctctgtcttttggagaaccagggctcttctcaggggctctagggactgccaggctgtttcagccaggaaggccaaaatcaagagtgagatgtagaaagttgtaaaatagaaaaagtggagttggtgaatcggttgttctttcctcacatttggatgattgtcataaggtttttagcatgttcctccttttcttcaccctcccctttgttcttctattaatcaagagaaacttcaaagttaatgggatggtcggatctcacaggctgagaactcgttcacctccaagcatttcatgaaaaagctgcttcttattaatcatacaaactctcaccatgatgtgaagagtttcacaaatctttcaaaataaaaagtaatgacttagaaactgaaaaaaaaaaaaaaaaaaaaaaaaaaaaaa

SEQ ID NO: 439 - DNA, 2591 bp, HUMAN
gcggccgcgtgaggcggaactctgagcaggtggtccattatggctgacatgcaaaatctggtagaaagattggagagggcagtgggccgcctggaggcagtatctcatacctctgacatgcaccgtgggtatgcagacagtccttcaaaagcaggagcagctccatatgtgcaggcatttgactcgctgcttgctggtcctgtggcagagtacttgaagatcagtaaagagattgggggagacgtgcagaaacatgcggagatggtccacacaggtttgaagttggagcgagctctgttggttacagcttctcagtgtcaacagccagcagaaaataagctttccgatttgttggcacccatctcagagcagatcaaagaagtgataacctttcgggagaagaaccgaggcagcaagttgtttaatcacctgtcagctgtcagcgaaagtatccaggccctgggctgggtggctatggctcccaagcctggcccttatgtgaaagaaatgaatgatgccgccatgttttatacaaaccgagtcctcaaagagtacaaagatgtggataagaagcatgtagactgggtcaaagcttatttaagtatatggacagagctgcaggcttacattaaggagttccataccaccggactggcctggagcaaaacggggcctgtggcaaaagaactgagcggactgccatctggaccctctgccggatcaggtcctcctccccctccaccaggcccccctcctcccccagtctctaccagttcaggctcagatgagtctgcttcccgctcagcactgttcgcgcagattaatcagggggagagcattacacatgccctgaaacatgtatctgatgacatgaagactcacaagaaccctgccctgaaggctcagagtggtccagtacgcagtggccccaaaccattctctgcacctaaaccccaaaccagcccatcccccaaacgagccacaaagaaggagccagctgtacttgaactggagggcaagaagtggagagtggaaaatcaggaaaatgtttccaacctggtgattgaggacacagagctgaaacaggtggcttacatatacaagtgtgtcaacacgacattgcaaatcaagggcaaaattaactccattacagtagataactgtaagaaacttggcctggtattcgatgacgtggtgggcattgtggagataatcaacagtaaggatgtcaaagttcaggtaatgggtaaagtgccaaccatatccatcaacaaaacagatggctgccatgcttacctgagcaagaattccctggattgtgaaatagtcagtgccaaatcttccgagatgaatgtcctcattcctacagaaggcggtgactttaatgaattcccagttcctgagcagttcaagaccctatggaacgggcagaagttggtcaccacagtgacagaaattgctggataagcgaagtgccactgggttctttgccctcccttcacaccatgggataaatctgtatcaagacggttcttttctagatttcctctacctttttgctcttaaaactgcttctctgctctgagaagcacagctacctgccttcactgaaatatacctcaggctgagatttggggtgggatagcaggtcagttgatcttctgcaggaaggtgcagcttttccatatcagctcaaccacgccgccagtccattcttaaggaactgccgactaggactgatgatgcattttagctttgagcttttgggggttattctaccaacaaacagtccattggaaagaaaacagtccctggaattaacagatcagaatgttcacactggttaatctttttttaacaatgagcatgaaggtagcagaagctggtgtgtttccagatggttcttctaaccaaactaatttttcactgttgacaagcgaggcaagggttgcactggaccaaaggctgaggcttggccatctagcattccatacaaaattgtttcctataagcattccttttattctctattctatcctgggtctgcctcaaccgtgagataggagagtctctggtactagctgctgtagcagtgcccttcatccagggcagttaatggagtcttggaccctttctttctctgggatccctgcccagcaccttcctatagagatgactttaaaaggaaaaaaaaaaaaaaacccacatgatttcaaggagtctggcattcctgaatccttcttccctgccaggtgcctgtcacctgtcttcactgcctccttttccctgtcatgctcatcagcttatggcttctgtctaagcacctgaacagaggactgaaacctccactgcaggctggttttaggtcttgaattatgtaagaatcttgcacagcactgctaatgtaaatttcagttgtttttccctctaggacaaacacttaccaaaatatgcaacttttttttggtgggaagagagattgtcctgtgatttctacccatttcctgaggcctgtggaaataaacctttatgtacttaaagttatacagaaaatagaataaagttaataccaaacttgaaaaagcggccgc

SEQ ID NO: 440 - DNA, 2030 bp, HUMAN
tggctggcaatggccttgctgacctcgagccgggcccacgtggggacctttggagcacagcctacgatcctggtgcaaggccggtggatgcagaggccagtccatataccacccaggcctgcgaggagcgtggtccccacccatccagcccatatgtgcaagtgcccttgacagagaggctggtcatatccatggtgaccatttatgggccacaacaggtccccatctgcgcagtgaaccctgtgctgagcaccttgcagacgtgatcttgcttcgtcctgcagcactgtgcggggcaggaaaatccaagaggaagaaggatctacggatatcctgcatgtccaagccacccgcacccaaccccacacccccccggaacctggactcccggaccttcatcaccattggagacagaaactttgaggtggaggctgatgacttggtgaccatctcagaactgggccgtggagcctatggggtggtagagaaggtgcggcacgcccagagcggcaccatcatggccgtgaagcggatccgggccaccgtgaactcacaggagcagaagcggctgctcatggacctggacatcaacatgcgcacggtcgactgtttctacactgtcaccttctacggggcactattcagagagggagacgtgtggatctgcatggagctcatggacacatccttggacaagttctaccggaaggtgctggataaaaacatgacaattccagaggacatccttggggagattgctgtgtctatcgtgcgggccctggagcatctgcacagcaagctgtcggtgatccacagagatgtgaagccctccaatgtccttatcaacaaggagggccatgtgaagatgtgtgactttggcatcagtggctacttggtggactctgtggccaagacgatggatgccggctgcaagccctacatggcccctgagaggatcaacccagagctgaaccagaagggctacaatgtcaagtccgacgtctggagcctgggcatcaccatgattgagatggccatcctgcggttcccttacgagtcctgggggaccccgttccagcagctgaagcaggtggtggaggagccgtccccccagctcccagccgaccgtttctcccccgagtttgtggacttcactgctcagtgcctgaggaagaaccccgcagagcgtatgagctacctggagctgatggagcaccccttcttcaccttgcacaaaaccaagaagacggacattgctgccttcgtgaagaagatcctgggagaagactcataggggctgggcctcggaccccactccggccctccagagccccacagccccatctgcgggggcagtgctcacccacaccataagctactgccatcctggcccagggcatctgggaggaaccgagggggctgctcccacctggctctgtggcgagccatttgtcccaagtgccaaagaagcagaccattggggctcccagccaggcccttgtcggccccaccagtgcctctccctgctgctcctaggacccgtctccagctgctgagatcctggactgagggggcctggatgccccctgtggatgctgctgcccctgcacagcaggctgccagtgcctgggtggatgggccaccgccttgcccagcctggatgccatccaagttgtatatttttttaatctctcgactgaatggactttgcacactttggcccagggtggccacacctctatcccggctttggtgcggggtacacaagaggggatgagttgtgtgaataccccaagactcccatgagggagatgccatgagccgcccaaggccttcccctggcactggcaaacagggcctctgcggagcacactggctcacccagtcctgcccgccaccgttatcggtgtcattcacctttcgtgttttttttaatttatcctctgttgattttttcttttgctttatgggtttggcttgtttttcttgcatggtttggagctgatcgcttctcccccaccccctagggg

SEQ ID NO: 441 - DNA, 1457 bp, HUMAN
cccaggcctcgcgctgcccggccggctcctcgtgtcccactcccggcgcacgccctcccgcgagtcccgggcccctcccgcgcccctcttctcggcgcgcgcgcagcatggcgcccccgcaggtcctcgcgttcgggcttctgcttgccgcggcgacggcgacttttgccgcagctcaggaagaatgtgtctgtgaaaactacaagctggccgtaaactgctttgtgaataataatcgtcaatgccagtgtacttcagttggtgcacaaaatactgtcatttgctcaaagctggctgccaaatgtttggtgatgaaggcagaaatgaatggctcaaaacttgggagaagagcaaaacctgaaggggccctccagaacaatgatgggctttatgatcctgactgcgatgagagcgggctctttaaggccaagcagtgcaacggcacctccacgtgctggtgtgtgaacactgctggggtcagaagaacagacaaggacactgaaataacctgctctgagcgagtgagaacctactggatcatcattgaactaaaacacaaagcaagagaaaaaccttatgatagtaaaagtttgcggactgcacttcagaaggagatcacaacgcgttatcaactggatccaaaatttatcacgagtattttgtatgagaataatgttatcactattgatctggttcaaaattcttctcaaaaaactcagaatgatgtggacatagctgatgtggcttattattttgaaaaagatgttaaaggtgaatccttgtttcattctaagaaaatggacctgacagtaaatggggaacaactggatctggatcctggtcaaactttaatttattatgttgatgaaaaagcacctgaattctcaatgcagggtctaaaagctggtgttattgctgttattgtggttgtggtgatagcagttgttgctggaattgttgtgctggttatttccagaaagaagagaatggcaaagtatgagaaggctgagataaaggagatgggtgagatgcatagggaactcaatgcataactatataatttgaagattatagaagaagggaaatagcaaatggacacaaattacaaatgtgtgtgcgtgggacgaagacatctttgaaggtcatgagtttgttagtttaacatcatacatttgtaatagtgaaacctgtactcaaaatataagcagcttgaaactggctttaccaatcttgaaatttgaccacaagtgtcttatatatgcagatctaatgtaaaatccagaacttggactccatcgttaaaattatttatgtgtaacattcaaatgtgtgcattaaatatgcttccacagtaaaatctgaaaaactgatttgtgattgaaagctgcctttctatttacttgagtcttgtacatacatacttttttatgagctatgaaataaaacattttaaactg

SEQ ID NO: 442 - DNA, 744 bp, HUMAN
ttggtacttggaaaaatggacaaggattgtgaaatgaaacgcaccacactggacagccctttggggaagctggagctgtctggttgtgagcagggtctgcacgaaataaagctcctgggcaaggggacgtctgcagctgatgccgtggaggtcccagcccccgctgcggttctcggaggtccggagcccctgatgcagtgcacagcctggctgaatgcctatttccaccagcccgaggctatcgaagagttccccgtgccggcacttcaccatcccgttttccagcaagagtcgttcaccagacaggtgttatggaagctgctgaaggttgtgaaattcggagaagtgatttcttaccagcaattagcagccctggcaggcaaccccaaagccgcgcgagcagtgggaggagcaatgagaggcaatcctgtccccatcctcatcccgtgccacagagtggtctgcagcagcggagccgtgggcaactactccggaggactggccgtgaaggaatggcttctggcccatgaaggccaccggttggggaagccaggcttgggagggagctcaggtctggcaggggcctggctcaagggagcgggagctacctcgggctccccgcctgctggccgaaactgagtatgtgcagtaggatggatgtttgagcgacacacacgtgtaacactgcatcggatgcggggcgtggaggcaccgctgtattaaaggaagtggcagtgtcctggg

SEQ ID NO: 443 - DNA, 1587 bp, HUMAN
gggcgaggggcggacaccggagagacacgggaaaggggtcgggacaggagcacgtggctcagacaccgacgccgggaggccgcagaccccggacgtgtcaggcatccccgcaggcccggagcgatggcagccttgatgaccccgggaaccggggccccacccgcgcctggtgacttctccggggaagggagccagggacttcccgacccttcgccagagcccaagcagctcccggagctgatccgcatgaagcgagacggaggccgcctgagcgaagcggacatcaggggcttcgtggccgctgtggtgaatgggagcgcgcagggcgcacagatcggggccatgctgatggccatccgacttcggggcatggatctggaggagacctcggtgctgacccaggccctggctcagtcgggacagcagctggagtggccagaggcctggcgccagcagcttgtggacaagcattccacagggggtgtgggtgacaaggtcagcctggtcctcgcacctgccctggcggcatgtggctgcaaggtgccaatgatcagcggacgtggtctggggcacacaggaggcaccttggataagctggagtctattcctggattcaatgtcatccagagcccagagcagatgcaagtgctgctggaccaggcgggctgctgtatcgtgggtcagagtgagcagctggttcctgcggacggaatcctatatgcagccagagatgtgacagccaccgtggacagcctgccactcatcacagcctccattctcagtaagaaactcgtggaggggctgtccgctctggtggtggacgttaagttcggaggggccgccgtcttccccaaccaggagcaggcccgggagctggcaaagacgctggttggcgtgggagccagcctagggcttcgggtcgcggcagcgctgaccgccatggacaagcccctgggtcgctgcgtgggccacgccctggaggtggaggaggcgctgctctgcatggacggcgcaggcccgccagacttaagggacctggtcaccacgctcgggggcgccctgctctggctcagcggacacgcggggactcaggctcagggcgctgcccgggtggccgcggcgctggacgacggctcggcccttggccgcttcgagcggatgctggcggcgcagggcgtggatcccggtctggcccgagccctgtgctcgggaagtcccgcagaacgccggcagctgctgcctcgcgcccgggagcaggaggagctgctggcgcccgcagatggcaccgtggagctggtccgggcgctgccgctggcgctggtgctgcacgagctcggggccgggcgcagccgcgctggggagccgctccgcctgggggtgggcgcagagctgctggtcgacgtgggtcagaggctgcgccgtgggaccccctggctccgcgtgcaccgggacggccccgcgctcagcggcccgcagagccgcgccctgcaggaggcgctcgtactctccgaccgcgcgccattcgccgccccctcgcccttcgcagagctcgttctgccgccgcagcaataaagctcctttgccgcg

SEQ ID NO: 444 - DNA, 2110 bp, HUMAN
gtgaagtgctcagaatggggcaggatgtcacctggaatcagcactaagtgattcagactttccttacttttaaatgtgctgctcttcatttcaagatgccgttgcagctctgataaatgcaaactgacaaccttcaaggccacgacggagggaaaatcattggtgcttggagcatagaagactgcccttcacaaaggaaatccctgattattgtttgaaatgctgaggacgttgctgcgaaggagacttttttcttatcccaccaaatactactttatggttcttgttttatccctaatcaccttctccgttttaaggattcatcaaaagcctgaatttgtaagtgtcagacacttggagcttgctggggagaatcctagtagtgatattaattgcaccaaagttttacagggtgatgtaaatgaaatccaaaaggtaaagcttgagatcctaacagtgaaatttaaaaagcgccctcggtggacacctgacgactatataaacatgaccagtgactgttcttctttcatcaagagacgcaaatatattgtagaaccccttagtaaagaagaggcggagtttccaatagcatattctatagtggttcatcacaagattgaaatgcttgacaggctgctgagggccatctatatgcctcagaatttctattgcgttcatgtggacacaaaatccgaggattcctatttagctgcagtgatgggcatcgcttcctgttttagtaatgtctttgtggccagccgattggagagtgtggtttatgcatcgtggagccgggttcaggctgacctcaactgcatgaaggatctctatgcaatgagtgcaaactggaagtacttgataaatctttgtggtatggattttcccattaaaaccaacctagaaattgtcaggaagctcaagttgttaatgggagaaaacaacctggaaacggagaggatgccatcccataaagaagaaaggtggaagaagcggtatgaggtcgttaatggaaagctgacaaacacagggactgtcaaaatgcttcctccactcgaaacacctctcttttctggcagtgcctacttcgtggtcagtagggagtatgtggggtatgtactacagaatgaaaaaatccaaaagttgatggagtgggcacaagacacatacagccctgatgagtatctctgggccaccatccaaaggattcctgaagtcccgggctcactccctgccagccataagtatgatctatctgacatgcaagcagttgccaggtttgtcaagtggcagtactttgagggtgatgtttccaagggtgctccctacccgccctgcgatggagtccatgtgcgctcagtgtgcattttcggagctggtgacttgaactggatgctgcgcaaacaccacttgtttgccaataagtttgacgtggatgttgacctctttgccatccagtgtttggatgagcatttgagacacaaagctttggagacattaaaacactgaccattacgggcaattttatgaacaagaagaaggatacacaaaacgtaccttatctgtttccccttccttgtcagcgtcgggaagatggtatgaagtcctctttggggcagggactctagtagatcttcttgtcagagaagctgcatggtttctgcagagcacagttagctagaaaggtgatagcattaaatgttcatctagagttaatagtgggaggagtaaaggtagccttgaggccagagcaggtagcaaggcattgtggaaagaggggaccagggtggctggggaagaggccgatgcataaagtcagcctgttccaagtgctcagggacttagcaaaatgagaagatgtgacctgtgccaaaactattttgagaattttaaatgtgaccatttttctggtatgccaataaaddcttacagcaacaaataatcaaagatacaattaatctgatattatatttgttgaaatagaaatttgattgtactataaatgatttttgtaaataatttatattctgctctaatactgtactgtgtagtgtgtctccgtatgtcatctcagggagcttaaaatgggcttgatttaacattgaaaaaaaat

SEQ ID NO: 445 - DNA, 1619 bp, HUMAN
ccgccagatttgaatcgcgggacccgttggcagaggtggcggcggcggcatgggtgccccgacgttgccccctgcctggcagccctttctcaaggaccaccgcatctctacattcaagaactggcccttcttggagggctgcgcctgcaccccggagcggatggccgaggctggcttcatccactgccccactgagaacgagccagacttggcccagtgtttcttctgcttcaaggagctggaaggctgggagccagatgacgaccccatagaggaacataaaaagcattcgtccggttgcgctttcctttctgtcaagaagcagtttgaagaattaacccttggtgaatttttgaaactggacagagaaagagccaagaacaaaattgcaaaggaaaccaacaataagaagaaagaatttgaggaaactgcgaagaaagtgcgccgtgccatcgagcagctggctgccatggattgaggcctctggccggagctgcctggtcccagagtggctgcaccacttccagggtttattccctggtgccaccagccttcctgtgggccccttagcaatgtcttaggaaaggagatcaacattttcaaattagatgtttcaactgtgctcctgttttgtcttgaaagtggcaccagaggtgcttctgcctgtgcagcgggtgctgctggtaacagtggctgcttctctctctctctctcttttttgggggctcatttttgctgttttgattcccgggcttaccaggtgagaagtgagggaggaagaaggcagtgtcccttttgctagagctgacagctttgttcgcgtgggcagagccttccacagtgaatgtgtctggacctcatgttgttgaggctgtcacagtcctgagtgtggacttggcaggtgcctgttgaatctgagctgcaggttccttatctgtcacacctgtgcctcctcagaggacagtttttttgttgttgtgtttttttgttttttttttttggtagatgcatgacttgtgtgtgatgagagaatggagacagagtccctggctcctctactgtttaacaacatggctttcttattttgtttgaattgttaattcacagaatagcacaaactacaattaaaactaagcacaaagccattctaagtcattggggaaacggggtgaacttcaggtggatgaggagacagaatagagtgataggaagcgtctggcagatactccttttgccactgctgtgtgattagacaggcccagtgagccgcggggcacatgctggccgctcctccctcagaaaaaggcagtggcctaaatcctttttaaatgacttggctcgatgctgtgggggactggctgggctgctgcaggccgtgtgtctgtcagcccaaccttcacatctgtcacgttctccacacgggggagagacgcagtccgcccaggtccccgctttctttggaggcagcagctcccgcagggctgaagtctggcgtaagatgatggatttgattcgccctcctccctgtcatagagctgcagggtggattgttacagcttcgctggaaacctctggaggtcatctcggctgttcctgagaaataaaaagcctgtcatttc

SEQ ID NO: 446 - DNA, 275 bp, HUMAN
  misc_feature (1)..(275): N=any base
gcttgtatataagattactttattcctgcatcttctcaatgggttcttccttgtatttgcccttttcctttccnacttggcgagatttggctttccgttcgaggatctttttgcgggctttgtccagttttagcctagnganaaccaccttgctggggngaatgcctacgngganagttgtgccattagccttttcccgntgcanccgttcaatgtagataacatatttcttccngtaaacctgggctactttgccaatttgctgaccnttatag

SEQ ID NO: 447 - DNA, 389 bp, HUMAN
  misc_feature (1)..(389): N=any base
ttctcctcggccaattcgcggaagaagtggctcacgccttccagagccacatcatcgcggtcgaaatagaagcccagagagaggtaggtgtaggaggcctgcaggtacaaattgaccaggctgttgacggctgcctccacgtcggtgaataattctgacgaatctgggagctcatggttggttggcaagaaggagctaaccacaaaaacggtgctggcaggtcccagaagcaggagatggccgagaagatggtcccggagttgcaagcggagaggaaatcggagggcggtcggaggctggaagagagtccccggatctgttccgtccaaacactttttgaagcaagagacagacccgcgggaccncctagtgccgaattnttggcttcg

SEQ ID NO: 448 - DNA, 443 bp, HUMAN
  misc_feature (1)..(443): N=any base
gccagggctcagtgggcaagggctctgtgccgtngncctgtacgactaccatgcagccgacgacacagagatctcctttgaccccgagaacctcatcacgggcatcgaggtgatcgacgaaggctggtggcgtggctatgggccggatcatntgttngcatgttccctgccaactacgtggagctcattgagtgaggctgagggcacatcttgcccttcccctctcagacatggcttccttattgctggaagaggaggcctggggagttgacattcagcactcttccagggaatagggacccccagttgaggattgaggcntcagggttccctccggnttgggcagattcagccttttcaccccaaatggcagcaattggcntgggtgatttcccacaaatcnttcctggcattcccccgacctttcccagacagtttggttt

SEQ ID NO: 449 - DNA, 636 bp, HUMAN
accatggccccctttgagcccctggcttctggcatcctgttgttgctgtggctgatagcccccagcagggcctgcacctgtgtcccaccccacccacagacggccttctgcaattccgacctcgtcatcagggccaagttcgtggggacaccagaagtcaaccagaccaccttataccagcgttatgagatcaagatgaccaagatgtataaagggttccaagccttaggggatgccgctgacatccggttcgtctacacccccgccatggagagtgtctgcggatacttccacaggtcccacaaccgcagcgaggagtttctcattgctggaaaactgcaggatggactcttgcacatcactacctgcagttttgtggctccctggaacagcctgagcttagctcagcgccggggcttcaccaagacctacactgttggctgtgaggaatgcacagtgtttccctgtttatccatcccctgcaaactgcagagtggcactcattgcttgtggacggaccagctcctccaaggctctgaaaagggcttccagtcccgtcaccttgcctgcctgcctcgggagccagggctgtgcacctggcagtccctgcggtcccagatagcctgaatcctgccc

SEQ ID NO: 450 - DNA, 46 bp, HUMAN
gtttattcatctgtttatgacacagtacacaggaggcaaagtgttt

SEQ ID NO: 451 - DNA, 250 bp, HUMAN
  misc_feature (1)..(250): N=any base
natccatcagctcgttcaactttagcacctgtctcgnccccagtggcttttccagaactactgccttcaccatgaagcnccatgagcttncccaattcaaacttgggctncttcagcatttttacttgnctaacgaagacancanggagagganaaatagantggcaagccttnncaangnctntaccaatgctgnctggaancaannnanngaccacnncnnacaagncaatagtctgnaccncncggg

SEQ ID NO: 452 - DNA, 367 bp, HUMAN
  misc_feature (1)..(367): N=any base
tccaaagaatttattatcaaaactaaaacaaaacttcagttgtacataaagtaataaactttacaacagctgttaagagaaagtcgtgatgtaagtttatacatattaccgaagcaaagaggacaagcaaaggagagctccagttggaatgttgattacattcatgcagcttcctcttgatttaaacactcatgacacattgaatgaaatcatcatatgggaaattcacaacaccttgctgagcagtatcccgtcttcgaaagctgtctgtaagngccctcagtttgacgcagcaggngntgtagtcgtcgaaggtgatctttccattggngctgtatcgttttgcaattggnttcacagcctgggg

SEQ ID NO: 453 - DNA, 3063 bp, HUMAN
ggcacgagtggctgcttgcggctagtggatggtaattgcctgcctcgcgctagcagcaagctgctctgttaaaagcgaaaatgaaacaattgcctgcggcaacagttcgactcctttcaagttctcagatcatcacttcggtggtcagtgttgtaaaagagcttattgaaaactccttggatgctggtgccacaagcgtagatgttaaactggagaactatggatttgataaaattgaggtgcgagataacggggagggtatcaaggctgttgatgcacctgtaatggcaatgaagtactacacctcaaaaataaatagtcatgaagatcttgaaaatttgacaacttacggttttcgtggagaagccttggggtcaatttgttgtatagctgaggttttaattacaacaagaacggctgctgataattttagcacccagtatgttttagatggcagtggccacatactttctcagaaaccttcacatcttggtcaaggtacaactgtaactgctttaagattatttaagaatctacctgtaagaaagcagttttactcaactgcaaaaaaatgtaaagatgaaataaaaaagatccaagatctcctcatgagctttggtatccttaaacctgacttaaggattgtctttgtacataacaaggcagttatttggcagaaaagcagagtatcagatcacaagatggctctcatgtcagttctggggactgctgttatgaacaatatggaatcctttcagtaccactctgaagaatctcagatttatctcagtggatttcttccaaagtgtgatgcagaccactctttcactagtctttcaacaccagaaagaagtttcatcttcataaacagtcgaccagtacatcaaaaagatatcttaaagttaatccgacatcattacaatctgaaatgcctaaaggaatctactcgtttgtatcctgttttctttctgaaaatcgatgttcctacagctgatgttgatgtaaatttaacaccagataaaagccaagtattattacaaaataaggaatctgttttaattgctcttgaaaatctgatgacgacttgttatggaccattacctagtacaaattcttatgaaaataataaaacagatgtttccgcagctgacatcgttcttagtaaaacagcagaaacagatgtgctttttaataaagtggaatcatctggaaagaattattcaaatgttgatacttcagtcattccattccaaaatgatatgcataatgatgaatctggaaaaaacactgatgattgtttaaatcaccagataagtattggtgactttggttatggtcattgtagtagtgaaatttctaacattgataaaaacactaagaatgcatttcaggacatttcaatgagtaatgtatcatgggagaactctcagacggaatatagtaaaacttgttttataagttccgttaagcacacccagtcagaaaatggcaataaagaccatatagatgagagtggggaaaatgaggaagaagcaggtcttgaaaactcttcggaaatttctgcagatgagtggagcaggggaaatatacttaaaaattcagtgggagagaatattgaacctgtgaaaattttagtgcctgaaaaaagtttaccatgtaaagtaagtaataataattatccaatccctgaacaaatgaatcttaatgaagattcatgtaacaaaaaatcaaatgtaatagataataaatctggaaaagttacagcttatgatttacttagcaatcgagtaatcaagaaacccatgtcagcaagtgctctttttgttcaagatcatcgtcctcagtttctcatagaaaatcctaagactagtttagaggatgcaacactacaaattgaagaactgtggaagacattgagtgaagaggaaaaactgaaatatgaagagaaggctactaaagacttggaacgatacaatagtcaaatgaagagagccattgaacaggagtcacaaatgtcactaaaagatggcagaaaaaagataaaacccaccagcgcatggaatttggcccagaagcacaagttaaaaacctcattatctaatcaaccaaaacttgatgaactccttcagtcccaaattgaaaaaagaaggagtcaaaatattaaaatggtacagatccccttttctatgaaaaacttaaaaataaattttaagaaacaaaacaaagttgacttagaagagaaggatgaaccttgcttgatccacaatctcaggtttcctgatgcatggctaatgacatccaaaacagaggtaatgttattaaatccatatagagtagaagaagccctgctatttaaaagacttcttgagaatcataaacttcctgcagagccactggaaaagccaattatgttaacagagagtctttttaatggatctcattatttagacgttttatataaaatgacagcagatgaccaaagatacagtggatcaacttacctgtctgatcctcgtcttacagcgaatggtttcaagataaaattgataccaggagtttcaattactgaaaattacttggaaatagaaggaatggctaattgtctcccattctatggagtagcagatttaaaagaaattcttaatgctatattaaacagaaatgcaaaggaagtttatgaatgtagacctcgcaaagtgataagttatttagagggagaagcagtgcgtctatccagacaattacccatgtacttatcaaaagaggacatccaagacattatctacagaatgaagcaccagtttggaaatgaaattaaagagtgtgttcatggtcgcccattttttcatcatttaacctatcttccagaaactacatgattaaatatgtttaagaagattagttaccattgaaattggttctgtcataaaacagcatgagtctggttttaaattatctttgtattatgtgtcacatggttattttttaaatgaggattcactgacttgtttttatattgaaaaaagttccacgtattgtagaaaacgtaaataaactaataac

SEQ ID NO: 454 - DNA, 1911 bp, HUMAN
gaattcccctgtgttagacggtacaggtggaagaagactgctgtgtgcaggaggaatttgcagtgagacttcaaggaagagaataagctcgccacataaagaggaaacaaagagcaacccagagttcagacccaggaagcggccgggagggcaggagcgaatcgggccgccgccgccatggagctgagagtcgggaacaggtaccggctgggccggaagatcggcagcggctccttcggagacatctatctcggtacggacattgctgcaggagaagaggttgccatcaagcttgaatgtgtcaaaaccaaacaccctcagctccacattgagagcaaaatctacaagatgatgcagggaggagtgggcatccccaccatcagatggtgtggggcagagggggactacaacgtcatggtgatggagctgctggggccaagcctggaggacctcttcaacttctgctccaggaaattcagcctcaaaaccgtcctgctgcttgctgaccaaatgatcagtcgcatcgaatacattcattcaaagaacttcatccaccgggatgtgaagccagacaacttcctcatgggcctggggaagaagggcaacctggtgtacatcatcgacttcgggctggccaagaagtaccgggatgcacgcacccaccagcacatcccctatcgtgagaacaagaacctcacggggacggcgcggtacgcctccatcaacacgcaccttggaattgaacaatcccgaagagatgacttggagtctctgggctacgtgctaatgtacttcaacctgggctctctcccctggcaggggctgaaggctgccaccaagagacagaaatacgaaaggattagcgagaagaaaatgtccacccccattgaagtgttgtgtaaaggctacccttccgaatttgccacatacctgaatttctgccgttccttgcgttttgacgacaagcctgactactcgtacctgcggcagcttttccggaatctgttccatcgccagggcttctcctatgactacgtgttcgactggaacatgcttaaatttggtgccagccgggccgccgatgacgccgagcgggagcgcagggaccgagaggagcggctgagacactcgcggaacccggctacccgcggcctcccttccacagactccggccggctgcgggggacgcaggaagtggctccccccacacccctcacccctacctcacacacggctaacacctccccccggcccgtctccggcatggagagagaacggaaagtgagtatgcggctgcaccgcggggcccccgtcaacatctcctcgtccgacctcacaggccgacaagatacctctcgcatgtccacctcacagattcctggtcgggtggcttccagtggtcttcagtctgtcgtgcaccgatgagaactctccttattgctgtgaagggcagacaatgcatggctgatctactctgttaccaatggctttacctagtgacacgtcccccggtctaggatcgaaatgttaacaccgggagctctccaggccactcacccagcgacgctcgtgggggaaacatactaaacggacagactccaagagctgccaccgctggggctgcactgcggccccccacgtgaactcggttgtaacggggctgggaagaaaagcagagagagaattgcagagaatcagactccttttccagggcctcagctccctccagtggtggccgccctgtactccctgacgattccactgtaactaccaatcttctacttggttaagacagttttgtatcattttgctaaaaattattggcttaaatctgtgtaaagaaaatctgtctttttattgtttcttgtctgtttttgcagtcttacaaaaaaaatgttgactaaggaattc

SEQ ID NO: 455 - DNA, 628 bp, HUMAN
tcgggagccgcggcttatggtgcagacatggccaagtccaagaaccacaccacacacaaccagtcccgaaaatggcacagaaatggtatcaagaaaccccgatcacaaagatacgaatctcttaagggggtggaccccaagttcttgaggaacatgcgctttgccaagaagcacaacaaaaagggcctaaagaagatgcaggccaacaatgccaaggccatgagtgcacgtgccgaggctatcaaggccctcgtaaagcccaaggaggttaagcccaagatcccaaagggtgtcagccgcaagctcgatcgacttgcctacattgcccaccccaagcttgggaagcgtgctcgtgcccgtattgccaaggggctcaggctgtgccggccaaaggccaaggccaaggccaaggccaaggatcaaaccaaggcccaggctgcagccccagcttcagttccagctcaggctcccaaacgtacccaggcccctacaaaggcttcagagtagatatctctgccaacatgaggacagaaggactggtgcgaccccccacccccgcccctgggctaccatctgcatggggctggggtcctcctgtgctatttgtacaaataaacctgaggcagga

SEQ ID NO: 456 - DNA, 274 bp, HUMAN
acccctgaagctctccaaggccgtgcataaggctgtgctgaccatcgacgagaaagggactgaagctgctggggccatgtttttagaggccatacccatgtctatcccccccgaggtcaagttcaacaaaccctttgtcttcttaatgattgaacaaaataccaagtctcccctcttcatgggaaaagtggtgaatcccacccaaaaataactgcctctcgctcctcaacccctcccctccatccctggccccctccctggatgacattaaaga

SEQ ID NO: 457 - DNA, 2166 bp, HUMAN
cggcccggccatggcggccccccgcccgtctcccgcgatctccgtttcggtctcggctccggctttttacgccccgcagaagaagttcggccctgtggtggccccaaagcccaaagtgaatcccttccggcccggggacagcgagcctcccccggcacccggggcccagcgcgcacagatgggccgggtgggcgagattcccccgccgcccccggaagactttcccctgcctccacctccccttgctggggatggcgacgatgcagagggtgctctgggaggtgccttcccgccgccccctcccccgatcgaggaatcatttccccctgcgcctctggaggaggagatcttcccttccccgccgcctcctccggaggaggagggagggcctgaggcccccataccgcccccaccacagcccagggagaaggtgagcagtattgatttggagatcgactctctgtcctcactgctggatgacatgaccaagaatgatcctttcaaagcccgggtgtcatctggatatgtgcccccaccagtggccactccattcagttccaagtccagtaccaagcctgcagccgggggcacagcacccctgcctccttggaagtccccttccagctcccagcctctgccccaggttccggctccggctcagagccagacacagttccatgttcagccccagccccagcccaagcctcaggtccaactccatgtccagtcccagacccagcctgtgtctttggctaacacccagccccgagggcccccagcctcatctccggctccagcccctaagttttctccagtgactcctaagtttactcctgtggcttccaagttcagtcctggagccccaggtggatctgggtcacaaccaaatcaaaaattggggcaccccgaagctctttctgctggcacaggctcccctcaacctcccagcttcacctatgcccagcagagggagaagccccgagtgcaggagaagcagcaccccgtgcccccaccggctcagaaccaaaaccaggtgcgctcccctggggccccagggcccctgactctgaaggaggtggaggagctggagcagctgacccagcagctaatgcaggacatggagcatcctcagaggcagaatgtggctgtcaacgaactctgcggccgatgccatcaacccctggcccgggcgcagccagccgtccgcgctctagggcagctgttccacatcgcctgcttcacctgccaccagtgtgcgcagcagctccagggccagcagttctacagtctggagggggcgccgtactgcgagggctgttacactgacaccctggagaagtgtaacacctgcggggagcccatcactgaccgcatgctgagggccacgggcaaggcctatcacccgcactgcttcacctgtgtggtctgcgcccgccccctggagggcacctccttcatcgtggaccaggccaaccggccccactgtgtccccgactaccacaagcagtacgccccgaggtgctccgtctgctctgagcccatcatgcctgagcctggccgagatgagactgtgcgagtggtcgccctggacaagaacttccacatgaagtgttacaagtgtgaggactgcgggaagcccctgtcgattgaggcagatgacaatggctgcttccccctggacggtcacgtgctctgtcggaagtgccacactgctagagcccagacctgagtgaggacaggccctcttcagaccgcagtccatgccccattgtggaccacccacactgagaccacctgcgcccacctcagttattgttttgatgtctagcccctcccatttccaacccctccctagcatcccaggtgccctgacccaggacccaacatggtctagggatgcaggatccccgccctggggtctggtcctcgcccatcctgcagggattgcccaccgtcttccagacaccccacctgaggggggcaccaggtttagtgctgctgctttcactgctgcacccgcgccctcggccggccccccgagcagcctttgtactctgcttgcggagggctgggagaccctccaggacattcccaccctcccccatgctgccaagttgtagctatagctacaaataaaaaaaaaccttgttttccaaaaaaaaaaaa

SEQ ID NO: 458 - DNA, 2966 bp, HUMAN
gcacgctgaaggagccggcggaaccgggtggccatggggatgtgggcatcgctggacgctttgtgggagatgccggccgagaagcgtatcttcggggccgtgctgctcttttcctggacagtgtatctttgggagaccttcctagcacagcggcagagaaggatatataaaacaacaactcatgtaccaccggagttaggacagatcatggattctgaaacatttgagaaatctcgactctatcaactggataaaagcactttcagcttctggtcaggactctattcagagactgaaggcactcttattcttctctttggaggaataccttatctctggagactttctggacggttctgtggttatgctggctttggaccagaatatgagatcactcagtccctggtgtttctgctgttggctacacttttcagtgcattgactggtttgccatggagtctttataatacttttgtgatagaagaaaaacatggcttcaatcaacagactttggggttcttcatgaaagatgcaatcaagaaatttgttgtgactcagtgtattttgttgcctgtgtcttcacttctactttacattattaaaattgggggtgactatttttttatttatgcctggctgttcacattagttgtgtctctggttcttgtcacaatctatgctgattatattgcccctttatttgacaaattcacacctctgcctgagggaaagcttaaagaagaaattgaagtaatggcaaagagtattgactttcctttgacgaaggtgtatgttgtggaaggatctaaacgctcttcccacagcaatgcttatttttatggcttcttcaagaacaagcgaatagttttgtttgacactctactagaagagtactctgtactaaacaaagacatccaggaggattctggcatggaaccccgcaatgaggaagaagggaacagtgaagaaataaaagctaaagttaaaaataagaaacaaggatgtaaaaatgaggaggtactcgctgtactaggccatgaactggggcactggaagttgggacatacagtcaaaaatatcattattagccagatgaattctttcctgtgtttttttttatttgctgtattaattggtcgaaaggagctttttgctgcatttggtttttatgatagccaacccactcttattggactattgatcatcttccagtttattttttcaccttacaatgaggttctttctttttgcctaacagtcctaagccgcagatttgagtttcaagctgatgcatttgccaagaaacttgggaaggctaaagacttatattctgctttaatcaaacttaacaaagataacttgggattccctgtttctgactggttgttctcaatgtggcattattctcatcctccactgctagagagacttcaagctttgaaaactatgaagcaacactgagatgtccaggatctgtgactgaagacatttctgattatttctgtcctgggcagcatgttccagctcttgatgtttttaaacttttttttagaagaaaaattaagtacagaaaagcccagatttaaatacatttaatatgtcattttaaaaatgattttaataattcatttcttaaaacactgaatgaattttgaagcttaatgtttttaaaggcatagttttatctttgacatctaatttaccatcaagttgtaaaattatttggaaaaatacagaactcgttttatttgtatacttatatggaatctgcatgtgaggtgtttgagggcatatgtttgaaagagggagcatcaccacaggaatccttctgtgaggtggaaacagtggtcctgaatcattgtgctcacacctaacttgaaatctggtcttactttcatgctgttatgatttcacctggtgaatcagtgttttaaataagaaaggtaatagttggtaaggccaatgttatttaaatgaaagtagttagaaaaatgctctcctattctaccaaatttttaatttctttcttcccctttcttgctacacagtgatcaagagtttctcatagtgctttgaagttagaaattatgtataggatattttaaatcattgagttttgtggggtttttttgtttgtttgtttcttttgttttttggaaaatccgtgtctttatctttttttcccacgtggtagatatgatcccattggaggtaaattgtagcttcttctcattcatgcagtaaataatacatcctttcactcagcagagatggccatattaaacacgttttgctatgttaaaagtggcagaacaggaaagacgaattaaaaataacattttttaagcgacataaggatgaaatactgatgaatctctgtgacattacagggaaaaaaatatagttttctatctctttcaagggcagaagagttttcatttttatttttgtaattttatctgtaagtcataaatattacttaatcaggcctgattctacttttgaaaattacagttcttgaaatgcagataatgtttactttgaaaacaaatgtcatgaatgatttccagtttttaaagctatatgtttcactgcttcatatctctgtccactttctgaatgagaacttattttgtgcctagagctctcactcactgataatgcttattaccttctgggcatttattccaaagtgggatcaactgtacgcctttggtatctgaccataaagtctttcctccgctgacatttgggtgatgtcttcacatggaaatataataaaaataaaaatctagtttaatactgcattatttattttcctaaggctaaagaggagcagtcctatgcttttattcagcatcctttatctgtgacttcatgctctgataactgcctttccttccttctgtgcctttgaatacaaatttcagttctgcaaaagtgaaacattaaacattgccaacgca

SEQ ID NO: 459 - DNA, 490 bp, HUMAN
  misc_feature (1)..(490): N=any base
agaaaatccctaagacagatcttgccgtggactagcantacctgcaagtgctgccaatgggaactcaatttattcctgggaacctaacgaggagagcccaggcctaggcaggaggctggaaccctcttggctaaggtgctgttcctgttcctgcaaggtctccagaacccctttggaaatggtgaaggaaccagcccaatagaagtacagagccagctgacaagtccttgtaaagctcactcctcagtccttggcacagcatgttttgtcttctctcttggtatttcttctctcccaactttaagccattttgccttggaatcatgattacaattttttcctttgcagatgccttcctgggggatactcctccccaccctaaagggtcgcctgcaacttaggcggattgggtctctctgctgtggcgttctctcttgagagaccctctgaattttagcacaaagtggcttctgtttcacagctgccacca

SEQ ID NO: 460 - DNA, 551 bp, HUMAN
  misc_feature (1)..(551): N=any base
gtcactctgctgcggcacagacctgaattaacaactctagctagggctgacttcaaaaagcactttcgttttttaataaccaacatcagctcagcaggcttcatttgggaaaagaaaccttgtcggattaccccgacattctccacctcctgggaggccagccattcccaaatgccccaaggatcgaagaacggagacggtaagatgattaattgcactgcaggttttttgtttctgtatttttttccctcctttttttgggtttactttcacattaatgaggtatttaggaaagacaaatggaatctgataaaaggtaacgttatattgtttgtcgaaacaacattttaaggatttcttgaagttatatggctctgtaggcatgtttcactttaagatgtgtttctgangtcatattaggagaacgactggtgattatctatgggaagattaactatgaaaccatatgggaaatatccttaatacctgtaatataccttataaccctgaatagttacatgacttttgggaagtggtnagagaattgtatt

SEQ ID NO: 461 - DNA, 277 bp, HUMAN
  misc_feature (1)..(277): N=any base
gtaatggggtccctcctntcctgccttttctggactgaggaaaatttcccatgaagacagtaaccaggaaaaattcagccacaactatttttcctatctcctgatgcttgaagatcggtgttacatatttgtcctactaggaaaccctacataatttattcattcaacaaatacttattagagtacctctatgatctggacagtcttccaaggcattggtggacaaaatggacaaaagtctcttgcacctcatgcaactcacatgcntataaaagta

SEQ ID NO: 462 - DNA, 535 bp, HUMAN
  misc_feature (1)..(535): N=any base
tttgccggagatgtggtggtacagtgggagctattctgacatgtccactggaagttgtaaaaacacgactgcagtcatcttctgtgacgctttatatttctgaagttcagctgaacaccatggctggagcagtgtcaaccgagtagtgtctcccggacctcttcattgcctaaaggtgatcttggaaaaagaagggcctcgttccttgtttagaggactaggccccaatttagtgggggtagcccttccagagcaatatactttgctgcttattcaaactgcaaggaaaagttgaatgatgtatttgatcctgattctacccaagtacatatgatttcagctgcaatggcaggttttactgcaatcacagcaaccaaccccatttggcttataaagactcggttacagctttgatgcaaggaaccgcggggaaaggcgaatgggtgcttttgaatgtgttccgtaagtgtatcagacagatggactaaaanggttttataggggcatgtctgcctcatatgctggtatatcagan

SEQ ID NO: 463 - DNA, 406 bp, HUMAN
  misc_feature (1)..(406): N=any base
ggaaggtcagagaacaccaaacagatttaacccaaataagatttccctaaggcatacaataatcaaactctcaaagttcaaggacaaagggaattctaataccagcaagagaaaagaagcaaataatatataaaggagttccaattcatttgtcaatnacattctcaacagaaaccattcagaactagatggagtgcaatgacattttcaaagtgctgaaagagaaaacacttccatacaagaatactctatatagcaaagttatccttcaggtacgaaggagagataaagactttcccaaacaaaagctgagagaattcactagcaccaggccagtcttacaagaaatgctaaagagagtttttctatttgaatgaaaaanaaaaacactaataggaaaagaact

SEQ ID NO: 464 - DNA, 577 bp, HUMAN
  misc_feature (1)..(577): N=any base
atgattcctcttgattcttttgttggccagagtgctgatggcaaaatggttcctataatccctggtggaaatagtatcccactcacattttccaacaggaaggaatatgtggagagggccattgaatatcgacttcatgagatggacagacaggtggctgcagtccgagaagggatgtcctggattgttcctgtgccgctgctgtccctcctcacagcaaaacaactggagcagatggtgtgtgggatgcccgagatctctgtggaagtcttgaagaaagtggtgcggtaccgtgagtggatgagcagcatcagctggtgcagtggttctggcacacgctggaagagttctccaatgaggagcgggtgcttttcatgaggtttgtgtcaggaagatctcgactaccagccaacactgctgacatttctcagagatttcaaatcatgaaggttgataggccttacgacagtctgcctacctcacagacctgcttcttccagctgaagctgccccccgtactcccagccagctggtcatggccgagcgcctgcctaattgcnaatcaacaactgccgct

SEQ ID NO: 465 - DNA, 457 bp, HUMAN
  misc_feature (1)..(457): N=any base
cgagattgtgccactcgatccagcctgggcgacagagcgagactctgctcaagaaaaaaaaaaaaaaagaaaataaaaaaaagattttgataaattgataccaacaggaggcattgtagtaaggtggaaagaacattggattgggagttaggagagtcaggttctgatgctggttctgccaccactcactttgttgttggttgattaattttaatttatgttttgagacagcgtctcactcccgtcgcccaggctgcgagtgncgtacggtgttcacagctcactgcagattcaacttgggttcaggtgattcttccacttcagcctcccaagtagctgggactacaggagtgcaccaccacgcccagctaattttttgtattttagcagagacaaggtttcaccatgttgcccaggctgatctcgaactcctgagctcaggtgatctgcctgcctt

SEQ ID NO: 466 - DNA, 647 bp, HUMAN
  misc_feature (1)..(647): N=any base
caaatggggagcctgcgccttgtgttggcaggcaatgcagtcattttccttacaattcaagggtttttccttatatttggaagaggagatgattttagctgggagcagtggtagcactttattctgattacagtgcattgaatttcttagaactcatactatctgtatacatgtgcacatgcggcattttactatgaaatttaatatgctgggttttttaatacctttatatatcatgttcactttaagaaagacttcataagtaggagatgagttttattctcagcaaatagacctgtcaaatttagattatgttactcaaattatgttacttgtttggctgttcatgtagtcacggtgctctcagaaaatatattaacacagtcttgtaggcagctgccaccttatgcagtgcatcgaaaccttttgcttggggatgtgcttggagaggcagataacgctgaagcaggcctctcatgacccaggaaggccggggtggatcccttttgtgttgtagtccatgcattaaaagtgtggcccacagaccaagagcctcaacatttcctagagccttattagaaatgcagaatctgaagcccactctggacccaggacatttgatgagatccaangagttgtatgcncat

SEQ ID NO: 467 - DNA, 479 bp, HUMAN
ctgagattagttcagatggtctaaccattgttctatatgtgcattttagttaatattgtgtattaaaggataagtcttaatgctcaaagtatgttaaaaatagatgtagtaaatcagtccctttgtgaatgtccttttgttagtttttaggaaggcctgtcctctgggagtgacctttattagtccaccccttggagctagacatcctgtacttagtcacggggatggtggaagagggagaagaggaagggtgaagggaagggctctttgctagtatctccatatctagacgatggttttagatgataaccacaggtctacaagagcgtttttagtaaagtgcctgtgttcattgtggacaaagttattattttgcaacatctaagctttacgaatggggtgacaacttatgataaaaactagagctagtgaattagcctatttgtaaatacctttgttataattgataggatacatct

SEQ ID NO: 468 - DNA, 308 bp, HUMAN
ctgtcaagctgttctttatttcagggagagggcaggggagtgtttgatttcggggtaggaatgtttctggttggagggcgctttatctcagggttggaatgtttctgattggaggtgtcatttgtggtttatggtcatgctgacagccattaggctgattttttgggggctggatttaggcggtttttaatcaaggggaacttaaaatgctgctgtttgtccaaaatgttgatgctcctgctttgtcaatccagaccctatagttataaaaggatgaggggcgacgtgctctttctggctacttcctg

SEQ ID NO: 469 - DNA, 588 bp, HUMAN
cagatactgtgctgagtgtaataggctgcatcctgctgaggaaggagacttttgggcagagtcaagcatgttgggcctcaagatcacctactttgcactgatggatggaaaggtgtatgacatcacagagtgggctggatgcagcgtgtaggtatctccccagatacccacagagtcccctatcacatctcatttggttctcggattccaggcaccagagggcggcagagagccaccccagatgcccctcctgctgatcttcaggatttcttgagtcggatctttcaagtacccccagggcagatgccaatgggaacttctttgcagctcctcagcctgcccctggagccgctgcagcctctaagcccaacagcacagtacccaagggagaagccaaacctaagcggcggaagaaagtgaggaggcccttccaacgttgatgccccttctctttcctcaaatcaatgtcagggagtcaaaagggctgtagcacaggatggagtttgatttatccctcctcccccaacacctaggaactgaatctttttctttttattttttgagatggagtcttgctctgttgcccag

SEQ ID NO: 470 - DNA, 533 bp, HUMAN
tctatacggaatattaaacacattactgatatcccatataattctgaaggacaagccatagtggaaagaatgaatctctccctgaaacagcagttgcagaagcaaaagggggaaaacaggtactacaggacaccccataagcaattgaatcgcattattaactttaaattttttgagcctgcctaaaggccggatcttatcagcagctgaacagcatctacagaaaccagctgcaaagacagaagcagaacaactggtttggtggagagacctgataacagaaagttgggaaataggtaaaataataacttggggtagaggttatgcttatgtttctccaggactgaaccatcaagacacctgaaaccttatcatgagcgaatgctgaggaagagattccgggagatcccgaggacccccccagctgcagccatgtcaagactgatgctgaggaggaccccaactgtcacgagcaacacccgtcaaacacagccacccacctgaggtcagatcaagaagctgtcacagatggc

SEQ ID NO: 471 - DNA, 402 bp, HUMAN
tgtacggagaagaccttcaattatcattacaggatttaaatttaccctggcttttaaaggaatagggcacacttttttttttttttttttttactatttctttttctttcttttgctctttgactccctctttgtctctctctctgtctctttctctctctgactctctctctctctccttctctctctctctccgtgtctctctcttagccattacaaacttggggccctggcaagggtgagtggggaatgggtcccacataactgcccattcgagagttatatacctaaattgggagagacaccagggataagactccctgggttataacctaggtgcctaaggacacaacacagagcttccttagattcctttggagatacaacttgctagaggaaatg

SEQ ID NO: 472 - DNA, 430 bp, HUMAN
gtcgacggacacagtggggaaacccagcaaggccactgtgcacaattccccttcccctgaggatagggcaggacccctcgggaatgagggtcttccagggaggagggagtgaccttgctaggttttatggctggctttgggagagaggagttctagtttctatgacctgctgtgagaaaaagaattgtggtttctgggactcactttgcggcagaaaagtaggcaggaaccaggagggaaggacaaagacctggcttctgaggccttccagtctcctctgggtcagagtagtctgcatgccaaggtgccatactttcggggtttaatgagccctgacagcaggtccttgcagatttcacaggcaacttgtgatcccagtaattgggtttcagtcccccaatttcagaggactttagcaaagcctggttga

SEQ ID NO: 473 - DNA, 561 bp, HUMAN
tttttttttcacaagactagatggagaattaatgaagaagaaatagaaatgaggcttatttaaggtacaaaattcttgtatttgtaataacctagatttatagatataaaacaagtcttttaaagacttccctaaaatactcaatataaaacaggagttacttatcctagatcatccttagttaggtacacatgattctctgtgcaactagctggtggacatgaataaaagctgctgggcctataatgtactaaaacatttttctcccttcagcaagacaggtagggttgaaggctaaatgcatcagaggagtattttcttaggcattttggacaatctttttgcagtaggttccataggttttccccagcgaaagttgactcagaccagagtaactctgacacaagttgccaagagggaaaaaatacttcatttgctagattacccaaatgtgtagcctcatttaattaccaaggtaagaatcatccccaaccacttttcagctgagaacacttgtcagagaatgtctctggatgggaatagatgtggtaccagctagcc

SEQ ID NO: 474 - DNA, 353 bp, HUMAN
tctctgaccaccggtgcatgcagcccctgtcacataccgcctgcttgctcaaatcaatcatgaccctttcatgtgaaatctttagtattgtgagcccttaaaagggacggaaattgtgcatacgtggagctcggattttaaggcagtagctgcgtgatgctcccagctgaataaagcccttccttctacaatttggtgtctgaggggttttgtctgcggctcgtcctgctacatttcttggttcctgaccaggaaacgaggtaactgatggacagccgaggcagccccttaggcggcttaggctcccctgtggagcgtcactcgggctggcggagtccgctcagggatggtcg

SEQ ID NO: 475 - DNA, 448 bp, HUMAN
ttaatgtccatttagtgaatttatttcattaggaagacagcaccatattgtactttcttcttcagctccgcttgttttcttcattaatttatcctttgaattccacagctttgaaaccagccatggtacccaggaccacagctatcaccagtattaccaagcataggattcccaaaattacagcaatgaggcgccaaggaggagatgcagcacacgatcctttctctgaaacaacagctatcctggtattgctttgagagtcgaagtgtaattgagtatatccatcttcatccaaattttctaaatcaggatgatattccattgttcttgagagcccctgaatagatatagcatttgggagctcttttctttctgctcctgagatgactgtctgtggacaaaagagaatctctgagtcaaatcatgtgggctaggtacttaccggagt

SEQ ID NO: 476 - DNA, 598 bp, HUMAN
  misc_feature (1)..(598): N=any base
aggggtcattttctantgcttcaggtttgtttgaaatccatggagcaacagtggttcccattgtgagtgtgctagccccggagaagctgtcagccagcactaggaggcgctatgaaactcaggtacaaactcgacttcagacctcccttgccaacttacatcagaaaagcagtgaaattgaaattctggctgtggatctacccaaagaaacaatattacagtttttatcattagagtgggatgctgatgaacaggcatttaacacaactgtgaagcagctgctgtcacgcctgccaaagcaaagatacctcaaattagtctgtgatgaaatttataacatcaaagtagaaaaaaaggtgtctgtgctatttctgtacagctatagagatgactactacagaatcttattttaaccctaaagaactgtcgttaacctcattcaaacagacagaggcttatactggaataatggaatgttgtacattcaccataatttaaaattaaatntaagaagaggctgggtgcagtggctcacacctttaatccagcactttgggaancnaggcaggaagactgttgaaccaggagttgagncagc

SEQ ID NO: 477 - DNA, 450 bp, HUMAN
  misc_feature (1)..(450): N=any base
ctccttctttggaaactggtgttcaagataaagaaatgctgaaaaaatatggaaaatcatttagaaaaatgatttcattgtgccttcaaaaagatccagaaaaaagaccaacagcagcagaactattaaggcacaaatttttccagaaagcaaagaataaagaatttcttcaagaaaaaacattgcagagagcaccaaccatttctgaaagagcaanaaaggttcggagagtaccaggttccagtgggcgtcttcataagacagaggatggaggctgggagtggagtgatgatgaatttgattgaaganagtgaggaagggaaagcagcaatttcacaactcaggtctccccngagtgngagantcaatatcaaattctgagctctttccaacaactgatcctgtgggtactttgctccaagttccagaacagatctctgctcatctacc

SEQ ID NO: 478 - DNA, 479 bp, HUMAN
  misc_feature (1)..(479): N=any base
agcccgtgtcacaggtatcacccccttcttgccctcagcccagctgctgtgcccctgccacccgcgccccctcagccccttgcgcgtcgcatccaaggtcacttgtgctcgcagctccacctggagccgttgccactgctgctgctgcgcttccagtcagggtgggccgctggctcccactgggcgtcagtttggctcccaggccctgggcagtgcagcctctgggcccgtctgctgcgctgcgttgcntggctgtgtgctgggctgtctttgctgtggggctgcagtgggggggggcggggtgtctggggacgcaggtgagtaggggagaaactggcagggtggtaagcttctgagcctccaggtaagtgcgtgcctgggagatgcacctgggagggacctcgctgccctcctgccgcctgcctcatcccttctctttccccttccagatccagaagatgaaagaaggaagtgagcat

SEQ ID NO: 479 - DNA, 445 bp, HUMAN
  misc_feature (1)..(445): N=any base
agattccaagttcaggagaactcgaccgttggaatgccaagatgccttggaaacagcagcccgagccgaggnctctctcttgatgcctccatgcattctcagctcagaatcctggatgaggagcatcccaagggaaagtaccatcatggcttgagtgctctgaagcccatccggactacttccaaacaccagcacccagtggacaatgctgggcttttttcctgtatgactttttcgtggctttcttctctggcccgtgtggccacaaagaagggggagctctcaatggaagacgtgtggtctctgtccaagcacgagtcttctgacgtgaactgcagaaagacttagagaagactgtgggcaagaagagctgaatgaagtttgggccagaacgctgcnttccctgcgaagggtttgtgttggaatcttctgccgnaccaggctc

SEQ ID NO: 480 - DNA, 441 bp, HUMAN
  misc_feature (1)..(441): N=any base
tagtagagactgggttttcgtcatgttggtcaggctggtcttgaactcctgacctcatgtgatccacccacctccgcctcccaaagtgttgggattacaagcgtgaccactgcacccagcctgtaaaatattttaagagatttattctgagccaaatatgagtgaccgtggcctgtgacacagccctcaggaggtcctgagaacatgtgcccaaggtggtcgggatacatcttggttttatgtattttaggaaggtatgagacatcaatcaaatacatataagaaatacattgatttggttcagaaaggcagaacaactcaaagcggggggcttccaggctataggtaaatttaaacattttctggttgacaattgtttgagtttgtctaaagacctgggatccatagaaaggaatgttcagtttaaaagataaggnttat

SEQ ID NO: 481 - DNA, 561 bp, HUMAN
atgcagtactgtaaggaagagggacctccagcttccacaaacaccatcttcagctgtatgaaagggacggttgtggtgaagtttgtcaggcacggtaagcatgctgagtggcggggatcagaactctcctatctgaacctactgaggagcaaagcagcaattacatgggatcctgtggctctcccgttgcagaggccacaggaagataggatggaacgtgactggtctcctaaccaaggtgcactgagaagcaatcaacgggtcggtcgtggccagtcctggggaggtctgagtggtggtctttgggataacctttggccttatggatttggactcgaaattagaagagcctaccatttcagatgcaatcacttttggacatgcttttgcagacagtccttaatgctgaaaacacagagaatgggtaattcaagaggcctttcttttaaaatagacttttgtgacccactaattgtaaggtattgcaaggtcactttgcgtgtgtcataaagttgacttccttattggttgaaggtcacagaagtagtggtttgctttgat

SEQ ID NO: 482 - DNA, 565 bp, HUMAN
atatttcagatataagatttcagttctcagtgagtctaagtgacagaaggaatggagaccctcttgggcctgcttatcctttggctgcactgcaatgggtgagcagcaaacaggaggtgacgcagattcctgcagctctgagtgtcccagaaggagaaaacttggttctcaactgcagtttcactgatagcgctatttacaacctccagtggtttaggcaggaccctgggaaaggtctcacatctctgttgcttattcagtcaagtcagagagagcaaacaagtggaagacttaatgcctcgctggataaatcatcaggacgtagtactttatacattgcagcttctcagcctggtgactcagccacctacctctgtgctgtgagggacaatgacatgcgctttggagcagggaccagactgacagtaaaaccaaatatccagaaccctgaccctgccgtgtaccagctgagagactctaaatccagtgacaagtctgtctgcctattcaccgattttgattctcaaacaaatgtgtcccaagtaaggattctgatgtgtatatc

SEQ ID NO: 483 - DNA, 484 bp, HUMAN
ttattagttcaagaaaaggcatacacatttattcaacatgtatacctggggagaaccagtcattaccccgatgttcattattttgatcaccacgatagagctgactactctgctatgtagtgcattttgggactgcacttatgtatgtttttgtttaacgtggacaaagacttacagataggtgcaaaaaataaatcctcttttgcaacccagaactcattgttcagtatgagttttgatacatataagaagggatattatgatacctgagacagttgattgatgggagtattgatagccataaaggttggttccaggccaggtgcaatgggtcaagcctgcaatccccacaccaaggtgggagtattgcttgaaaccaggagttcaagaccagcctaggcaagaaagtaagaaacacatctccacaaaaatttaaaaattggctgggtactggggcatgtgcttgtagttggagttactcaga

SEQ ID NO: 484 - DNA, 573 bp, HUMAN
gcattaaggacttgaatgccaccttccagacagagaagatagggcacccccatgggctgcagatcacctacaggagagatggccacaccaggaacctgtttgtgtatcatgaaagtgggaaggagatagtggactggttcaatgccctccgtgcagcccgtctgcagtacctaaaaatggcctttcctgaactcccagagtctgagctcgtgccattcctcaccaggaactacctcaaacaaggcttcatggaaaagactgggccaaagcagaaagaacctttcaagaaaaggtggttcgccctggattgccatgagcggaggctgctctattacaagaacccactggatgccttcgagcagggccaggtttttcttgggaacaaggagcagggatatgaagcctacgaagacctgcccaaggcatccgaggaaatcgctggaaagccggactcaccattgtcaccccagagcggagatttgtcctcacttgccccagtgagaaggaacagcaggaatggctggaaagtttgcggggtgtcctgtccagccccttgacgcccctcaaccggct

SEQ ID NO: 485 - DNA, 566 bp, HUMAN
ttctccccaaaatagccacattcttttatttgatgattcaatacatttttgattcaaatagtcaccacataacctaggcacgatattaagcattttacaagcaaaatattttactgattttcttttaaattgccagagtacaataagtgaactggttaagagacatacttctgtacataaaaatatccatgtatttatacaagtgtatggaacagagtttaagataataaaaccacaacatcacaataaataggatgtgttcctactgcacagcacagcacgctttatcaggaagctgccaagtctttttcaaggtgctttatgtttttctgagctaggctcagatttccccaaaaaaggaataggttagtaatggctggatctgaatgtctactttcataagttgctttttattttcatctccaataacaggaatggaagatatgataatttaattattttcaaaaagtctttgcaacttaccaattctattccaattcagttttttaaaatgcagattaatctaactctagcaccatacgagaatgaaatacatgtatttttgt

SEQ ID NO: 486 - DNA, 378 bp, HUMAN
accacgaggtggaggctgctgtgagccaagattgcaccactgcactccagcctgggcaacagggtgagaccgtgtctctagaaaaaacaaaagccaaaaggatggcatttggtattaacaagatcttaacaagatctggggagttgggctatgggaacacacacctggggggcctaagaccttccagagaccatggtgcttgagtaaagctgaaaggagctcgcaggcccagacaagtggtagtgtgtgtgcgcttggttgcgagacaccatgtgcacaaacctggaggcacggtcgtcttgtgagagtgtggaggtcagcttggctcattagaaaccagggccatggccaggcgcggtggctcatgcctgtaatccg

SEQ ID NO: 487 - DNA, 452 bp, HUMAN
gacagacacttcataagctttagatttagagaatttcacagcataaagctcatcgctgatgcagtaatgaaggaaatgttctacaagttaatagatgagtgagagaagagggcattcatattagatttatttacttactgaactcagagccttgggttactgcttgacccccactgttatctagtttaagggtccttttattttttgtttttttgaggtggagtttcactcttgttccccaggctggagtgcagtggcccggtctctgctcactgcaatctccgcctcccagattctcctgtctcagcctcccaagtagctgggattataggtacccaccaccacgccctgctagtttttgtatttttagtagagacagggtttcaccatgttggtcaggctggtctcgaactcctgacctcaggcagtctgcccacctcagcactttggga

SEQ ID NO: 488 - DNA, 423 bp, HUMAN
ggttgctcagactgacacatgtagactaaatagaaacccctcagccctaaaatagaaaaaagaacagttctggactattgaacagcccattcatttatttctgttttgtttaccgacatattcagtattattcttgttttctgaattctgagtctcctgaacaaaaggcttactatccatggtcttggaaaagattgtcccttctcttgctgttgtaatgcatctctgctacagcagtcattgtcatcctgtgaccttatcccttttgtctcccatcaccttttccttcttcagcagcacctcacagtcagtcagacgctgcaggcaccactatcaccaggagtggccaagtaaaccgagacaccagtaacagcagggctggagcttcctcagcgttttgggaaggaaagagatgttcccctg

SEQ ID NO: 489 - DNA, 507 bp, HUMAN
tttttttttgaaggttaaattgcattatttcttttatttttatgatttttttaataccaaaaaaaagagacaagattttgccatgttgccgaggctggtctcaaactcctgacctcaactgatcctcccgtctcggcctcccaaagtgctgggatgacaggcgtgcactgccctgccttgtgcttttatttctaaacacattttcctaatgtatttttctgatgactctcaaggggaggatggctgttttggctgggtgtggtggtgcacacctgtagtcccagctactcaggaggctgagcggggaggatcgcttgagcccaggagtttgaggctgcagtgagctatgatggtgccactgttctccagcccaggcaacagagcaaggccctgtctctaaaaaaataaatattataaacaaaaaccaaaacaaaacaaaaacaaggaagagcaactgcatagctgcctgacaaaacgagagcgtggctcagccccacggccctgcgt

SEQ ID NO: 490 - DNA, 657 bp, HUMAN
ttttttttttagtgtcctctaattttattgatgcttcagttttcataaagtgcaataaacaacataaatagatgaaaaaagctttgaagatttatatacagttttgaggttaagataaattactgactatattcctttcagccttttaactctgtgaaagctgtaacgtacattaaaagcacattgaactaggttaaataatgatctttcccccttagatcaatctagtattaaggagtatataattatgcaagttcattctataacacgaggctagactaaaaggacaatttttgtgctacagactaaatccagatacggtcaggtgctgagcagtattcctggcttcaaaataggaggtatctgtttcatcatctggctgcgcgggatgaaaggcatagtctgatgctgcagattttcccagtccacatcactgaagagaggatgacgttttagctctttcattccagctctctttgtatcatcaatggttaaaagtatttctactgcactttgaggcattatcagataacttttcttcaccttctggccagggatatctcttttcagaatattctggaatacttgttgtggtgtttcatcattgaaagggggaattcctgttagaaattccaaccagcaaacttccagtggcca

SEQ ID NO: 491 - DNA, 510 bp, HUMAN
cattgtcactgtatctgtcagaatcattacttccattctgccttgtattttctgctgaagaagaaattgttggcagaggagtagaagatcttgattctgttccttgttccctcagtttcaaaagctttttctcatatagcttcctggttgttcccacaataggaccaggattcactccgtatttcacaagctgatccaaaagatcttcattagtgagctctgttacatctagatcatctttatcttcttgtctgggtttatcagttttattcgtggctttcctgccgacggctgctcggctccggcccgcggggcgctcccagagccgaggaccggggtgggctcgcgctcttcgtcactggagaagtccgggggccccttgctgttggtgccggcggggagcggcggcctggttgcgagccgtgaggtgctgcaggtagagctggacgtacacgtctttgcgctgctccccggccggcagcgtcacattgttggcgaccaactcactct

SEQ ID NO: 492 - DNA, 546 bp, HUMAN
ggaaatacaagggacctagaatagccaaaacaacctagaaaaaacaaacttaggactctcgctttcacaatttcctacaaagcaacagaaatcaaggcaatgtggtattggcataagaagatattatagatcattagaatacaattaagaatctataaataaacccatacctctatagttgatttttgacaatgggaaaaaaatcctttccataaatggtgctctgacaattgaatagccacgttagaagaacgaagtcagatctctctttcatatcatatatgaaaattaactcaaaatggatcaaagacctaaatgtaggagatataactataaaattcttaaaacttagtcgtaaatattcataaccctggattaggcacaagcaaccaaagaaaaaataagttggacttaaaaacagtgtttcaaaggacattatggagaaagtgaaatgattcagagtccgtgtgattgtaatcacatgctgacaacactcagtctaagtcagacttctgttgtattctcaccactcaatttgtgcttttt

SEQ ID NO: 493 - DNA, 438 bp, HUMAN
ttttttttttaggagagacaggatttcaccatgttggccaggctggtctcaaactcttgacctcaagtgatctgcctgccttggcctcccaaagtgccaggaatacaggtatgagccactgcaaccatccacattttttatttttgtactatatactggggttctactaccaaaaaaaggaactactagcttataaagtttctttcaccatttaacattctatctctcacacatcaataccactcaggaaataggaagaaacgttgaagtgccatcaagcaagtgttacctgtgaatctgatcttgcctgcttgaccgtactggagccagaccatcaatttcgtcaaaaaaaataattgatgggcgcatctgataggcctgatcaaacagcaatcgtagctgtctttcagattctcctacccatttacttagacaatc

SEQ ID NO: 494 - DNA, 483 bp, HUMAN
attgccacaaagtttaacttcttcattcacaaccttgctcagcttcgtttttctggtcttccttctaatgatgagcccatcctttcattttcacctaaaacatactcctttagacaagatggtcgaatcaaggaagtctctgtttttacatatcataagaaatacaacccagataaacattatatttatgtagtccgaattttgagggaaggacagattgaaccatcatttgtcttccgaacatttgacgaatttcaggaacttcacaataagctcagtattatttttccactttggaagttaccaggctttcctaataggatggttctaggaagaacacacataaaagatgtagcagccaaaaggaaaattgagttaaacagttacttacagagtttgatgaatgcttccacggatgtagcagagtgtgatcctgtttgtacctttcttcaccctttacttcgtgatgagaaagctgaggga

SEQ ID NO: 495 - DNA, 496 bp, HUMAN
ggtcgacaaaagggtagcagtttattcatctgtgataggaaaataatacttatcttacaaggttgcaagagctcaaggagaccatgtatgtaaagttcctgctgtaaatatgaactcccatcctaatacccttttacctctctgtgggtttgtcttgacctggaaatttgggctaaaacttagaaaaaattcttacatgataactcagtgatgcttactcatagtttttggtgtttctcatagataagatataaatcagctgggcgcggtggctcatgcctgtaatcccagcactttgggaggccgaggcgggcagatcacctggggtcgggaggtcgagaccagcctgaccaacatggagaaacccgtctctactaaaatgcaaagttggctgggcgtggtggctcatgctgtaatcccagctacttgggaagctgaggcaggagagttcgttgaacccaggaagccgaggtttatgttagcgaaatcgtgcatt

SEQ ID NO: 496 - DNA, 466 bp, HUMAN
gaccatctctactaaaaatacaaaaattagctgggtgtggcggcacacgctgtagtcccagctacttgggaggctgaggcgggagaatcacttgaacctgggaggcggaggttgcagtgagccaagattgcaccgctgcactccagcctggcaacagagcaagactccatctcaaaacaaacatacaaacaaaaaaaggtgcctctggtcctgtgttttctttttccttctgaaagttcatagaaacctggcatatagagcttattttgctgttttaactggttggctccacaaatcctgctacctgacatcagtacagcttgaccgcagtcaagtacttgatggcttgttcatgtttagttcacctctttagaaagaaagctttgtggccaggtgcagtggctcacgcctgtaatcccaacaccttgggcagctgaggtgagcagatcacctgaggtcaggagtt

SEQ ID NO: 497 - DNA, 412 bp, HUMAN
ccaagccctttaatattcacttaaacagtttaggcacaagcaataataaaactgcattttttacgttacaaaaagattttgtatgttatctgcatgatataccaattttctcaatctcttctgcaataacatctcattaacactctggtccacatgttgcactaatacattattttccatttccaaagttttttagtaagtgtgcaacattagcacatggaaacgctcaagctgtgtattagttcactgaaatctggggttttttcgttctcacctgctgagcaccatttggccagcatcactacaacaagctgattacatcaccttgtaaaacttaagatggggatgaatagtgtttggcaattacatttctgggagaaaaaactgctgattttttctttaactcgacaca

SEQ ID NO: 498 - DNA, 502 bp, HUMAN
tttttttttttattgagaaaagcacacacatttatttactgtaagttttacatgacaggaatcttcagaaatgaagacaaaaaagaaataggaaaacttgtgtatttttatgtacagtcttatgcagaagtataatcagaggacaaaaggacataatctaatggtaataaactgtggagaacttagcaagtcctatttgtccagattcttcttggtgtctctgtatctgtgaggataaagggtacctatggaatgaaggttttatgatctacttcagggaacagtcacttagggtttatggcctgcttcaggggagaaggggtaaggggaaggtatgagaaaccttgcttctgcagttttctcaaataacagggtgcaatattttggggttatgtgtcctgaatcccatcaacgttaagatggagagaccagcccaaatctttagttggattccagctaagtcttatacacctaagggacagaggagtagtcatatatatgc

SEQ ID NO: 499 - DNA, 249 bp, HUMAN
gggtaacttcctgatgttgccatgacatttgtagactgtcatggcactgatgggagtacctcttagcatgctaataccttataattagcatataatgagtagtgaggacgaccagaggcgactttcatcgccatcttggctttggtgggttttggcagccttctttactaatgctgttttatcaggaaggtctttgtgaccttgtatcttgtgccgacctcctatctcatcttgtgacttagaatgcct

SEQ ID NO: 500 - DNA, 513 bp, HUMAN
tttttttttttttttttttttttttttttaaaaagtgcatattctttaatccaggaattactcaagaaatttatacattttttaaaaagatcaccaaatgcatcccacatagttcctttacaataaacaaaagataaacaacctagcgtcctgtcctatatgcgctctaccagatgactcaattatattccatccatccatggaatcctagacaatcataaaaggacatttatgttaacatggaaagttaagatacgctttgaagaataggctacaagagagaatacattacacaatcctactgctgtataaaacaaaacatctggaagaatctatgcttaaatattaatagtgtgtcccgcaaagtggtaggataatagtgacttttattctttttacttatctctattttctcatgtttctgtaatgaacatgtttcataaaacaaaatgggtctgttataaaaatctgaaaacttgtttttgaaagagagcagtattacaggctgtagtg

SEQ ID NO: 501 - DNA, 429 bp, HUMAN
  misc_feature (1)..(429): N=any base
catcaatgcgtacgggattaatccccgcttcagcagccatttcatgttgggcttcttcgctgatctcttcattgttcatcaaacgggtgagcagtaactggaagtagtgggccagcggtgtgcgttcacctctgcgacaggctctgcgcattcggtcgcgtactcatcggcaatatcaaaatattttagcgggatatcgtggttcattatttgcccctggggttaatgcgctaagcataagggcggatgatagcactcgtgatccgggtcatacatctttttatagttaatggcgcggcgcgtntaccctcaggcaggataatgcgccggcatccgactattacgtttcactcaccggcgttctgtcaccatcatacaacggcactttgcgatagatgcggatcagataccataaatatgcgccgccta

SEQ ID NO: 502 - DNA, 439 bp, HUMAN
gtagcccggctgaagaacaacaacagacaagtgtgcattgacccgaagctaaagtggattcaggagtacctggagaaagctttaaacaagtaagcacaacagccaaaaaggactttccgctagacccactcgaggaaaactaaaaccttgtgagagatgaaagggcaaagacgtgggggagggggccttaaccatgaggaccaggtgtgtgtgtggggtgggcacattgatctgggatcgggcctgaggtttgccagcatttagaccctgcatttatagcatacggtatgatattgcagcttatattcatccatgccctgtacctgtgcacgttggaacttttattactggggtttttctaagagagaaattgtattatcaacagcattttcaagcagttagttccttcatgatcatcacaatcatcatcattctcatt

SEQ ID NO: 503 - DNA, 558 bp, HUMAN
ccctgtttgcaacaaagtatgctttaaaatgtaaactgtggagccattttccttgcgttgtccagaaggaacttcgtcctgcgtgacgctggattaatcatgagagagctcgtcaacattccactggtacatattcttactctggttgccttcagcggaactgagaaacttccaaaagctcctgtcatcaccactcctcttgaaacagtggatgccttagttgaagaagtggctactttcatgtgtgcagtggaatcctacccccagcctgagatttcctggactagaaataaaattctcattaaactctttgacacccggtacagcatccgggagaatgggcagctcctcaccatcctgagtgtggaagacagtgatgatggcatttactgctgcacggccaacaatggtgtaggaggagctgtggagagttgtggagccctgcaagtgaagatgaaacctaaaataactcgtcctcccataaatgtggaaataatagagggattaaaagcagtcctaccatgtactacaatgggtaatcccaaaccatcagtgtct

SEQ ID NO: 504 - DNA, 481 bp, HUMAN
  misc_feature (1)..(481): N=any base
aattcggcagaggccccagaatgcacctttcagggcctccccaggctgagcaggaaacagggtcgcccccaccctcacccccggcgatgttgcgggccccaaaggcaggggcacttggctgttctgaatggcggatcgatgctgaggacccagaactcgctcaggatgcagccgaaagccaggtgtgtgtactgggagtcctgcagcgacaccacccacgggaactccatgctgctgaccaagccctccttggggtcaggaccgtagaaaacggaagctttctggacgccacaacctgcggacgtgncnnggggcctcactgccggggcaaggagacctcaggaccctctctcctgtgggctgtctgtctcgatcatcactaacgctatccgcaaccccttttctttcttttgcctagtgtgtcttcttcaccctaaaagatgctcagtggcatttttgaatcccaaaattatgttagact

SEQ ID NO: 505 - DNA, 216 bp, HUMAN
ctctctcctgccatgtaaggtttttgctaagaaatatgctgctagccttattggaactctcatatatgtgatttatttctattctcttgctgcttttaggattctctctttgtctttgatttttgatagtttgattataatacattttgttatagtcttgtttggatagaatctgattggagacatttggtccttataccttgatattattcccca

SEQ ID NO: 506 - DNA, 335 bp, HUMAN
gtagagacagggtctctttatgttgctcagacagtgagggttctctgtctttccactcacctcccccttgttgcctcttcctccccacgtcccacccccatgcatcttcccacccaggccagcagacctgtcaggatggactggtcaacccgcagcgtggtggatttgatggcgaggattcggatgtctgcagggactttgtcccacactgtggagagagtagggaagagggaggtcacttgggaatggaattttcttccttccaaagaaaaacccaatctgtgtcttgactcgttctcctcatccatccttcaggtctcagggaggctcccagg

SEQ ID NO: 507 - DNA, 313 bp, HUMAN
ttaataatgctattattaggagtattattattcgattcatatgtttactgttcaacaaatattgaatgataaacatatatgctgggtccggcatggtggcccatgcctgtaattccagcactttgggaggccaaggcgggcaggtcacttgaggtcaggagtttgagaccagcctggccaacgtggtggaaactccgtctgtgctaaaaatacaaaaattagccgggcatggtggtgggtgcctgtaatcccagctactcgggaggctgagacgggagaatcacttgagcccaggagctggagtgcagtggtg

SEQ ID NO: 508 - DNA, 514 bp, HUMAN
atctctgcccttacgtcgttctctatcccgagaccgactacgcgttcttctgtgactggacctttcactgctacgactatgagaacggagacgaggtcttgacctggaccttcttgttctgctttttgacctagacctctgaactctataggatttccctcgaccccttgaacgacttcgacttcgtttccttctggagccataagaagagctactgcttgatcgatgcctgcgtcttctatcataagaatgtgaacgaggctgaagatctctggaccaagatcttgactttgatcttgatttccttcctcctttctttcggctgtatgttctactatctgaagaactgctcgaggaggaccgtctacggtgtttcttttttctcttgcttctgctttcttcttcagtatctgatgaccgacgtcccatttctggggtcagacccttgggctcaaacttccgttgacgtgcaaaccccgagtccctgattcgttcttaaatcaaggggccccgt

SEQ ID NO: 509 - DNA, 406 bp, HUMAN
ttagagtagttttagcaaaattgaatggaaggtacggagattcccatgtacccctgtctcctccatcatcaacattctgcaccagagcagtgcatttattacaactgatgaacctatttgatgcatcattgtcactcagagtccatagtttacagtagggttcactcttggtgttgtacattctgtggatttggacgaatgtatagtgacgcatatccaccattattgtatcatacagaacagtttcacagccctaaaagtggggagattggcctcagttcgcctacctaagagactaaatgacttacccatatatggttgcctccatatgaagagcagtgagaaccgccggccgctggtgtgtctcaaatgcctgtgaacagtgaaatcctcacttggatggtgg

SEQ ID NO: 510 - DNA, 594 bp, HUMAN
tttttttcctaaataattcagtatttatttccttagaacaaggacaaatttgcataaccacagtagggttgtcaaaatcagcaaatctaatattgatacactatacaatcctatgaccaatctcatctacaactttattcaaattttatagaggctgggattacaagcatgaaccactctatccagctgattccatgttctctaacaccctatccacacaaatctgagatgggctcaaggatgaccacaggccttggagatctctgcagtgagcatctgtgcggctgaatctgagtaaaggattctgcttcaggctgctggccagcaaggtgtctcaggagcaggctggtgcagggcagctatggagagacattagctctgcctgcacttacagcctgaggaccaagcaggctctggaggcagagaaaggcctcagcaaagaagggcaggtcgacctgcaaggaagagtgagtggagggaatggggcggggcaccacagcctctgctaaggtctcatggcacttagcagggtcctcagcgtctgctaagagctcaggaaatggtacctgctctcattcagaccgtttccatcgt

SEQ ID NO: 511 - DNA, 514 bp, HUMAN
tttcttggcttcacaaaacccacaccactacttcatggatggtatagccattaaccctgaggcttctgtcacacaaagcaaatagccattcttctgtgctctcataatgttcaaccattccttttacttagagaattccagaaactgaccttaggagagctaaacatcaaacaaggttgcgagtgtccttccttgggaagaaaaactgaaaaattgattactgcttcgctgcccccaccagaccaccaggtggttcattactcaagagaaccatcacaaccagacatgctgacctgcatcccctacccttcacatgctttgcccagcccagcctgcatacactagtcttgaaatcaattcccatgttttgtctaattaaaaaaaaaaaaaatccctaatggcgtttctttgggagctagccagaggatctttctcaccgttgctgtctcccttgcacttgagcataagccccataataaaagtcttatctggaaaatctgcttggccatgagtt

SEQ ID NO: 512 - DNA, 506 bp, HUMAN
atctcttctttccttctctgaatctcatgcaggatttcacgttgctcctgctcttctttccgcttggcctccaacagcctctgctgctcctcctgagcccgcctttccagcatttcttcatgaaaagacttgggagggggcttgttatgctcgctgagaaatgactgcacgtggtaagccagttcaaagatcatcacctccccacagtgtttcttggccagttcttctaggcgagattttaacaaattgacactttcatttgatagacctttggcattttttaactctatttcaggaactacatctggataggtaggtgggcatttaaccctcaaatccacttttacatatacttcttcaccagttaggccttgagggtacaaaactaaattgatttcagggggctctttgacccggtcgcaagcgtccggccgcagtccttggaagtccgggccgtaaaagggcctccaggcctgtaacccgtggtcctgtccgtgccggtaacc

SEQ ID NO: 513 - DNA, 393 bp, HUMAN
tagggacagagtctatgttgcccagtggggctatccacaggtgtaatcatagctcactgcagcctcgaactcctgacctcaagtgatcctgcctcctcagcctcccgagtagctgggaccacaggtgcatgccactgttcatgagttttacagacttttacattttaacttttgactcttttgtaattaacacaacacaaatacattgtacagctgcataaaaattattttctttatactcattctgtaagcttttttctattaatttttcttttaaaacttttttttcccttaaacactaagacagaaacacacacattagcctaggcctactcaggatcttcaatatcactgtcttcccttctacatcttgtcccactggaaggccttcag

SEQ ID NO: 514 - DNA, 378 bp, HUMAN
  misc_feature (1)..(378): N=any base
acgggttcatgatggtgaatgatatagcgggtgacagatggctacaaaccagtcataggccatcacactcaggagcatgtctctcttccatgcctccaaaaatggcaaagagagacatctgagtcaggcagcctgcataggagatgactctgctgtgagactggatgtccacaatcatcttggggaccgtggtggaggtgaaaccgnatgtcaggcaaggacaggttggagaggaagaagtacatgggggtgtggaggtgggagtcagggctgatggccaggatgatgagcaggttccccagcaccgtgaccaggcacatggacaggaacagcccagcaaggactggctgcagttctggatcccctgagacttcaaca

SEQ ID NO: 515 - DNA, 2380 bp, HUMAN
gccaccatggccccgcccccaccgccactggctgccagcaccccgctcctccatggcgagtttggctcctacccagcccgaggcccacgctttgccctcacccttacatcgcaggccctgcacatacagcggctgcgccccaaacctgaagccaggccccggggtggcctggtcccgttggccgaggtctcaggctgctgcaccctgcgaagccgcagcccctcagactcagcggcctacttctgcatctacacctaccctcggggccggcgcggggcccggcgcagagccactcgcaccttccgggcagatggggccgccacctacgaagagaaccgtgccgaggcccagcgctgggccactgccctcacctgtctgctccgaggactgccactgcccggggatggggagatcacccctgacctgctacctcggccgccccggttgcttctattggtcaatccctttgggggtcggggcctggcctggcagtggtgtaagaaccacgtgcttcccatgatctctgaagctgggctgtccttcaacctcatccagacagaacgacagaaccacgcccgggagctggtccaggggctgagcctgagtgagtgggatggcatcgtcacggtctcgggagacgggctgctccatgaggtgctgaacgggctcctagatcgccctgactgggaggaagctgtgaagatgcctgtgggcatcctcccctgcggctcgggcaacgcgctggccggagcagtgaaccagcacgggggatttgagccagccctgggcctcgacctgttgctcaactgctcactgttgctgtgccggggtggtggccacccactggacctgctctccgtgacgctggcctcgggctcccgctgtttctccttcctgtctgtggcctggggcttcgtgtcagatgtggatatccagagcgagcgcttcagggccttgggcagtgcccgcttcacactgggcacggtgctgggcctcgccacactgcacacctaccgcggacgcctctcctacctccccgccactgtggaacctgcctcgcccacccctgcccatagcctgcctcgtgccaagtcggagctgaccctaaccccagacccagccccgcccatggcccactcacccctgcatcgttctgtgtctgacctgcctcttcccctgccccagcctgccctggcctctcctggctcgccagaacccctgcccatcctgtccctcaacggtgggggcccagagctggctggggactggggtggggctggggatgctccgctgtccccggacccactgctgtcttcacctcctggctctcccaaggcagctctacactcacccgtctccgaaggggcccccgtaattcccccatcctctgggctcccacttcccacccctgatgcccgggtaggggcctccacctgcggcccgcccgaccacctgctgcctccgctgggcaccccgctgcccccagactgggtgacgctggagggggactttgtgctcatgttggccatctcgcccagccacctaggcgctgacctggtggcagctccgcatgcgcgcttcgacgacggcctggtgcacctgtgctgggtgcgtagcggcatctcgcgggctgcgctgctgcgccttttcttggccatggagcgtggtagccacttcagcctgggctgtccgcagctgggctacgccgcggcccgtgccttccgcctagagccgctcacaccacgcggcgtgctcacagtggacggggagcaggtggagtatgggccgctacaggcacagatgcaccctggcatcggtacactgctcactgggcctcctggctgcccggggcgggagccctgaaactaaacaagcttggtacccgccgggggcggggcctacattccaatggggcggagcttgagctagggggtgtggcctggctgctagagttgtggtggcaggggccctggccccgtctcaggattgcgctcgctttcatgggaccagacgtgatgctggaaggtgggcgtcgtcacggttaaagagaaatgggctcgtcccgagggtagtgcctgatcaatgagggcggggcctggcgtctgatctggggccgcccttacggggcagggctcagtcctgacgcttgccacctgctcctacccggccaggatggctgagggcggagtctattttacgcgtcgcccaatgacaggacctggaatgtactggctggggtaggcctcagtgagtcggccggtcagggcccgcagcctcgccccatccactccggtgcctccatttagctggccaatcagcccaggaggggcaggttccccggggccggcgctaggatttgcactaatgttcctctccccgc

SEQ ID NO: 516 - DNA, 490 bp, HUMAN
ttttcatccaaaataggtaaaaccttgttagccaaagcagtagcaaaccaaacctcagccactttcttgagagtggttggctctgaacttattcagaagtacctaggtgatgggcccaaactcgtacgggaattgttccgagttgctgaagaacatgcaccgtccatcgtgtttattgatgaaattgacgccattgggacaaaaaggtagactttctcatacttattttgccttgtttagtagggaacaccgcatagctcttctcttgagaatgggcaatctcagggggctctccctatggccacagttcttgctgtgcgtggccttccatgcatgctttaggctctgctctcccaggagccagctaacaactgcccagtaactgtgaacgtctggagagactggtcagttatgaataaccatgtcttgagcacccgccctgatccaggaccatctggactctagggacacagttgtgagcacaagtctc

SEQ ID NO: 517 - DNA, 338 bp, HUMAN
gagacagtttcacttttgttgcccaggctggagtgcagtggcgcggtctcagctcaccgcaacaagagcgaaactccatctcaaaaaataataataatgaggagaaggccttccagttatggcagcacaaagaggcaggcaatttctttctgtaaaaaaaaaaaaaaaagcaacaaccaaccaaaaaatatataaaactagacaaaattatttatcaaaaccaaccatttcaggaaactggaaattgacaaaatgcaggcaaaaaattgagcagcatttattcttgaaaaactactagatctttaggcaagtaggagattgtggctttttctgcctgt

SEQ ID NO: 518 - DNA, 401 bp, HUMAN
gcgccccgtttcccaggacgaagggcactccgcaccggaccccggtcccggcgcgcggcggggcacgcgccctcccgcgcgcgctctctgaccccgtctctctcttcctcgacttctctctggagctcttgctacctctttcctctttctgctggtttccaaaatccacagtgatttggggaagtagagcaatctccccaagccgtcggcccgattcaagtggggaatggcaagcaaaaataaattaaaacgagaaacaatacagttttaaaaaaaaatgtttaagaaaaaagaagagggataaaacccggatcaatgaatatcaaattccagcaccgagcgccctggccggtgagtccgctgaccggtccacctaaccgctgcgcctcccgacagagcgc

SEQ ID NO: 519 - DNA, 751 bp, HUMAN
tttttctggctacaaattttattccgttacaaatagcaccgagcccttggggctgcccctgtggagagggatccccctcctggacccccacctcctcccctgagctacccatgtagtgtctgggagctggcacacggcccagggtccctctggaagctgggccaggccaaggggttaggcccaggcccttcgtggggtgggcccagggccagctgtggcagatgtgcaggtaggtgagcggcagcctctcagatgagcacactggccacgggcacgcgggtggagcggccccgctggggcaccacaatccggtcgtctgtggaccctgcttcgtgcagcaggccctgcacgtgcagctgtgcccgccggcggtcggcctcaatgaagatggcggtgcccaggaaggctgcgccgcccagtgccccaacaaacgcgcagagcatgagcgagaactgcagagcccggaactcggacaagaaggaggggggccagttccggcgcaggcggtcagagatcaagccaatgaggtaggggctcccagcatcacccagcaagtgggacagcacgatctggaaggcctggcggtggagcgtcgggtagggatcaccacgtacagcagaatgtctgccacgatggccccagtcatggacaggagggtctctccaatgaagatgaaaatataagtggccacgatgctaccacgggcgcatgcaagggacaggaagaggaggggtgcagagcccaggatgcc

SEQ ID NO: 520 - DNA, 443 bp, HUMAN
gctctgcttcccttttaaatataagttctaccttttgtctttgctcccacatctgaatataagtggctagaagcagccacaccacttcttgatcactttgctgcttagacatttcttctgccagataccctaaatcatcactctcaagttcaaacttccacagattcctagggcatgaacagaaggcagccaagctctttgctaaggcgttaacattgtgtgacctttgcaaagtgcttgggtgcattctgttcatgtcctagctatcagcattttggtcacaaccatttaaccagtccctaagaaattccaaactttccctcatctttctgtcttcttctgagccctacaaactcttccaacttctgcctgtcaccaagttccaaagctgcttccacattttcaggtatctctacagcaatgactcacttctcagtaccagt

SEQ ID NO: 521 - DNA, 435 bp, HUMAN
ttaacaagtcttgacaaatgtatgcagtccgataacagcgtgatcacaatgtagaacagttctcagataggcattgtttaaaagtcaggaaagatgtatatcagaattagagactgagatttagctgatcttcacattttctgtattgttgaaatgcttataatgcccattttgcatccaggattgaagaggctggcccagccagggatgaacttcgggtcccgggtgaagaggaggatggcaaacatgcagaaaaggatgaaaacagcctgttcggcaaacttgatgggccccaggttctggtattcttcccgaattacagctcgagccctatcttctgcattggttcttatctcagatttattcttcctccagcccctgaagctcagtcccccgtacaggaaggagatccagagccagcctgccaacaggaag

SEQ ID NO: 522 - DNA, 414 bp, HUMAN
acgtttattaatactcttctgttgccctttggaggtctgagggggagtccttgcagggcctctggtctgtccctgttcatggaaggcagtgctcaggaggcagcagcaaagtgccaatgaagcagggcgttagtgccgatggagcagggagccagtaccggtggagctgggcgttggtgccaatggagcgaggcactggtgcgggtggagcggggcgttagtgccgatggaatggggcaccagtgccgttggagctggacgtagtgatgatggagcagggtggtagtgccgacggagctggacatagtgatgatggagcggggtggtagtgccgatggagccggacgttagtgacaatggagtgggacaccagtgccgatggagcagggcgttagtgctgatggagtggggcac

SEQ ID NO: 523 - DNA, 345 bp, HUMAN
ttatgtagtaattactctttattcaaatattataataatcttcactctacaatcataacctaggaaaaaccaggccatacagaggtatgagctgaagggacatggtgagaagtgaccagaagacaagtgtgtgagcctctgttatgcccggacaggcgcaccagagggctccttggtctagcggaacgttagcgtctgggaagacgctgttaccaagcggattgtggtctagcagtagcatcagtgccaaggaaaagcacccactacttagcagaccagcaaagggagtctccctttccccgggggagtttagagaagactctactccaccatgtcttgtggagg

SEQ ID NO: 524 - DNA, 436 bp, HUMAN
  misc_feature (1)..(436): N=any base
gcccctatacccaggtcggacgacgnatttgcacgtcaggaccgctacggacctccaccagagtttcctctggcttcgcactgcccaggcatagttcaccttgcccgaagacttcacacccttgaggatacagaggaacacgatgacccaggccagcagcaggcagaggcagaggttccagcggatctccccagggctgccgatgccctggctgccttggatgtggaggacgtagcggctccagtactcctcgctggggctgacggtgcaggtgaggttgaggggcagggctntngaccgtccttggagactctgtgctccaggcagagttctgtgttccaccagttgccacagtgctcccagggtaggtcgctggtgagggaggcgaagaggtagaagagcacgtaggcgatgatcatgttgtagtagatggtca

SEQ ID NO: 525 - DNA, 242 bp, HUMAN
ctgttaaattcctcctagaagcaaagcacctgagagatgagatccaagtaaataagacccaaatcccggacacgtcacacaatactcggagctgtaccatgacttcaccaccacgcaggtgtgaatgcacgacattgtccgcagcttccggcagaccatggaccaatacagcacggagcccggcagatacaggttcatggggactgaagcctatgcagagagtattgacaggaccgtgatgt

SEQ ID NO: 526 - DNA, 407 bp, HUMAN
  misc_feature (1)..(407): N=any base
tttttttttcttccaggaggcaaggaccttttcctcgtttattcttatcaggaaaacttctattcaaggtagaaggacaataagagtgaagccttcacagctgacagacactgcttgtccattggctatgtcatcctgggcaaagtcctcagcctcttggagcctgtttccttgcctgtaaaatgtggacagtaatagctaccctgctggttggttgggaggattagacgtaatctatcaaaagtgctgctaaaactgcccctggaangtaatggacaatgaaaaaaatcactaaaactattttgtgtgggagaaaagggtttcacccagaatttaatccaactctactagtttgctcccaaagggttctgtcaatcacaaccaacttcagagtctaaaactgaacc

SEQ ID NO: 527 - DNA, 1862 bp, HUMAN
ggccgctgaatggccgagtcgctgagccgcggctgccggacgggacgggaccggctaggctgggcgcgccccccgggccccgccgtgggcatgggcgcactggcccgggcgctgctgctgcctctgctggcccagtggctcctgcgcgccgccccggagctggcccccgcgcccttcacgctgcccctccgggtggccgcggccacgaaccgcgtagttgcgcccaccccgggacccgggacccctgccgagcgccacgccgacggcttggcgctcgccctggagcctgccctggcgtcccccgcgggcgccgccaacttcttggccatggtagacaacctgcagggggactctggccgcggctactacctggagatgctgatcgggacccccccgcagaagctacagattctcgttgacactggaagcagtaactttgccgtggcaggaaccccgcactcctacatagacacgtactttgacacagagaggtctagcacataccgctccaagggctttgacgtcacagtgaagtacacacaaggaagctggacgggcttcgttggggaagacctcgtcaccatccccaaaggcttcaatacttcttttcttgtcaacattgccactatttttgaatcagagaatttctttttgcctgggattaaatggaatggaatacttggcctagcttatgccacacttgccaagccatcaagttctctggagaccttcttcgactccctggtgacacaagcaaacatccccaacgttttctccatgcagatgtgtggagccggcttgcccgttgctggatctgggaccaacggaggtagtcttgtcttgggtggaattgaaccaagtttgtataaaggagacatctggtatacccctattaaggaagagtggtactaccagatagaaattctgaaattggaaattggaggccaaagccttaatctggactgcagagagtataacgcagacaaggccatcgtggacagtggcaccacgctgctgcgcctgccccagaaggtgtttgatgcggtggtggaagctgtggcccgcgcatctctgattccagaattctctgatggtttctggactgggtcccagctggcgtgctggacgaattcggaaacaccttggtcttacttccctaaaatctccatctacctgagagacgagaactccagcaggtcattccgtatcacaatcctgcctcagctttacattcagcccatgatgggggccggcctgaattatgaatgttaccgattcggcatttccccatccacaaatgcgctggtgatcggtgccacggtgatggagggcttctacgtcatcttcgacagagcccagaagagggtgggcttcgcagcgagcccctgtgcagaaattgcaggtgctgcagtgtctgaaatttccgggcctttctcaacagaggatgtagccagcaactgtgtccccgctcagtctttgagcgagcccattttgtggattgtgtcctatgcgctcatgagcgtctgtggagccatcctccttgtcttaatcgtcctgctgctgctgccgttccggtgtcagcgtcgcccccgtgaccctgaggtcgtcaatgatgagtcctctctggtcagacatcgctggaaatgaatagccaggcctgacctcaagcaaccatgaactcagctattaagaaaatcacatttccagggcagcagccgggatcgatggtggcgctttctcctgtgcccacccgtcttcaatctctgttctgctcccagatgccttctagattcactgtcttttgattcttgattttcaagctttcaaatcctccctacttccaagaaaaaaaaaaaaaaaaa

SEQ ID NO: 528 - DNA, 393 bp, HUMAN
ttttcagattccacaaggatttattggcaccggacctagcctggtgcccgccccttcaaggaaagacactaacaaggaggagtgccggcaccgcaagagccctcccagaagcgcccagactgggggtcggggaggacgctgccattcgtggccaggaagggaagggagattccggaggagggtgggcacggcgcagggaaaggccgggtggtgggatgggcagggaggcggggtaccggccccgctagaaggggaactcgcagacgtagtagagacgccgctggcagtcgtggtcccaccaggagccgtcgtcagaggcctgcgccacgcagttctcgagcgtgccaccgttgggctggtccgggctgagcggatgcggcgaggcgctgggct

SEQ ID NO: 529 - DNA, 927 bp, HUMAN
  misc_feature (1)..(927): N=any base
tttaagatggctgtttcataaattagttccctattcctaactttggagaacctggttttttcttacctttcaaggtccaaatataaaactataaactttcagtgttggacattcttgctttttgaaagcaaattcctcctcaattcatgacctgtgggccagctatcatgaataatacacccatagcccttgggttttatgaatgtgacttctaaatcctcctgcataatagctttaggtgacttgaagagttaaaagctgtcattgtcatcaatatttactgtacatcaaactcatttaaaatgctgttagaaattgctgactggcaagactgtcactgacaaaaacaccagtttaggacagattccatgggaaacaaactagaataactgaaagctaaaatagagcttaatggtagagaaagtctcagaaacaaggacagagatcacagaaaagacaaggaaggactcctattggtttttctgattttgaagagctctttgtgcttacctatttatcctaaacaaaaaggcatgagtaaaaatttccaatgtattacaaagggtattctgtctaatgtcaggctggctctcangatgttataaacctgcccaggtattagacttctgatgagactgtgccttaaggacaggaatggcactttctactaaaaactactgccatctgggagcaaagactggggatngaaactacaagacaaacctgtctagtatgacttgtgatccagagcctnttgactatgggactagacangtgcaacattctttcctttttcactgacccatanagaagttacagactttcattgtaatccaacttaccggttattcttggagatgcccagccaatctgtgccgatattggcccaggccaatactttagggacgtttaatcgatctatatacc

SEQ ID NO: 530 - DNA, 529 bp, HUMAN
ttttttgagggatgcacaagtctttattcctgctggcagaggaggtggtcctgtggctggcggagtgggcacctcaggctggcagctctcacctcttgctggccggcagcttcagccacttgggcaccttgcccaggctcctcttcacgggctgggccgtccctgggatgggctcaggggggaccagcgccccctcctcagcagctggctcagacttaggtgcagggtcaggggctggcaatggggaaggggacccggcggccctggacatgtacctggccaccagcacgtcggccgcagatggggagatggcatgctccagcaggccaggctccaggtagacacctgccggctcctcggctcccaagtgcaccagagcggccgggaagaggttcgcccggcctgtccccacgtgcttgtgcccagccttgactcgggagggatcgccactgctcggacgaggggatggtggagaggagggtcggcagactgggtggcatggaggctgaccagtgcttggagaggctcg

SEQ ID NO: 531 - DNA, 440 bp, HUMAN
tccgatgggcacagctttattctggaacggtgaacccagtggggaggatcctgcaggcggacggcagttggggtactatagatgactaagtagggtccagtccatcgaggttgtagagtttgaggggtcaggttcttaataagaactgatcgtccagctagggtgtcttcatatagttgggaatcctctactgtaagagttatccaaagctcagcatccgtaatggtccagggggcttccaaggcgatcaggcagcatcagtcttcagctgctaagctgagaagatctgggaaggagtcagtcagagagcctttggccagagttctaggggccctgggagtggctgccgggttggacagtccgatttccagtggggtcccgatttgaaattcatgagatgttccttgggctggttggtctgaggacccgaagtcgtaggt

SEQ ID NO: 532 - DNA, 527 bp, HUMAN
ttttagagaaacgttgtgtttaatggtaaagcttaacacaccccagcaccaagaatggtgtggagttgcagtagcaacaggccggtgaccccccatggagcctcacatggcgaagaggatgaggaaggcgaccatcaaacagaaaagccccatggcctcagacagggcaaagccaagaatggcataggagaagagctgctgcttgagagacgggttcctggcatagccaatgatcaagctgccaaacacggttccaatgccagcccctgaaccagccacaccaactgtggctgccccagcaccaataaacttggctgctgtgtcaatgtcccgggagacaacactggtctggaactcccgtctggccacctggagtgggaagttgctgtaggaaggctgtttagatgaattcactgggctattcaagaaggaggcagacacaggcctgattagacccctggtacaacagcggatcagagctggagaaatgaataatgcacaggcggtctgcattttttcagtctcac

SEQ ID NO: 533 - DNA, 794 bp, HUMAN
ttttttccaaataactggtaataatttttattaagttttccctaatgcattttcaattctacatttcaagagtattgaacttttctcacttttgcactctaatcagaaaaaccagaattaaatttttattttaaaatacatttaataaaaataacccatagttttacatattttacatgtgtagaatatttacaaactcacttctacagcatttacttaatgtttactatttttccattatttgcctttttggctatttccctcagtagtaaaatgttgtccagtgttctctttaaaaaattagtttcttgggcaatcctccttgttctaaggcctctgttcttttcctttttattgccaaagctggatttgattgctcctttaaggtttccactggacagtttggtcttggcagctgacatccaagtgttggccctggcccgatactggaatcacttcattttcagtgcctgtgtggccgtaattcgagcactgaattaaataagattaagccttgtatgagatctagtaagtcgtctcctgctgcactgaagatgtgatgcaaaggtattccagggaaactcttaaatgtcacataatctggaagactacacatgtccggccactgttcctcagttgttgtgcccaaagtttcaaatattctggttagctgatcaaggtctgaatctcctggcaaaaaaagaaccctttagagtacctctgctatatacagccaacagcccacattgtcacacctacccatacatcctagctcccaatggaactcgggggcc

SEQ ID NO: 534 - DNA, 714 bp, HUMAN
ttttttttttttttttacaattttactttttggcgggtatttaaatattttcttatctgcagagctatctcaggatatgaaatcataacatgctagcaactagtaatttaacattaaaacacttccctaaattattccatggaaaagtgcatttacaatataaacatgtcatatatgaagctacaaatcataatctcactggagtggatataaaatttcaaattcagtccaaatgagtcaaagaaaaaagtgctaacagagcaaatctgaaacaagttcatggggattgggtaatgagtcatcgaaacgaaatcttttggaaaccatgctgctatcctctgggatattctctttgtcttctctatcaccacaggttccattacaggaggatttagaagtcttgtcttcagaggaccttacagaatgatcctgagtttgagaggaactggaagtttcttcagggtgaaacaagctttcaaagtcccactgctgtagccaagaatgagaaaggcatatctctgctgttggtcttttctctggattttttactaagaggctctgaataaagtctgtggccagctgtgaaactgatgaaaaagtttcttccgaataatctacattaacttgagagatattgaggtatgtttcttgattatcttctcccacaaatggtgatgtgtgagttaacaacataattgctattataccaatatt

SEQ ID NO: 535 - DNA, 600 bp, HUMAN
ttttgtttccaaaacaagaatgctgtttatttgctgatcaaaacttgtgggaaaaattaaagtaaaaaaatattgggagaagaatggaaagcctttggataaatgattagctggttaaataaatgagcctgtgttactgaatgagtatggattgcccggttactttttttgtttcttgacactctttgctttgggtcgtttactttcaatgtttgctttagattcttcctgtccagtttttgctttagattcttcctgtccagtttttgcttcagattcttcctgtccagtttttgttttagattcttcctgtacagtttttgttttagattcttcctgttcagcttttgctttggatagtggcatcctttcctgtttgggttttaagtggtttcctatcacttgccggaaaaacacaaaaaccactgaaaggattaataaaataaggcgaaacattatgatggacacaacccacattggcgaagaaatcgcccctctgagcagtcctggaggcccactggcaatgcttccttcataccccacttcctcacagaatggaagtgcccacccatacatgcagtggcagctttttctggtgtt

SEQ ID NO: 536 - DNA, 575 bp, HUMAN
tttttttttatttttaatagtgtacatttattcaaaagtatataaaacaacactgtaaattatataatctcacataaaaacactagaacttgatttgaataacaaaacaatctactaagaagtattgctcatgaagatttttgtgcccacctttcctaactcagaggccctcatttatgtcgcaacagcaaggtggcagggaatcaaaactggcacacattctatatccttcacagcactgcagggcaggacaagactccgtggcaatggttttggcctggctgttcttggcccaccacaccttgtctgggttgtgattttttacagccacagcttcaggttcctttgcagcttttagcgcgttgtgtattttgaagtaaagacagagcacgacaactatcagcaggagcaaggccgccaggataccaccagcgatgacaagcataatcactgtatggaggtcaaaagacttcgatgtacctgcataaataatggctcctctgctccaggaagggcaagaaacatttcaaaaagagctccaatcatgtgtcagacatccccttgtcaggcatcct

SEQ ID NO: 537 - DNA, 464 bp, HUMAN
  misc_feature (1)..(464): N=any base
aaacccgncactttattgccaatatatatttttaactagagatggcatctcgctccattatcaaagctggccctgaactcctgggctcacttgattctgcctcaggcttcagagtagctgggattacaggtgtgcgccactgtacctggcctcaccattcagtcttgagagggctgtccattggttaggcctttaagacagagtacagggtctcgttctgggggctcttgaggggacggtggctgggaggtgctctgggtgaggtggagctggagagggcaagggaagcatagacgatgccgtcatccttgggatttagcttgggatctgtattttgtccttcattcctgatattctcatatggctcctctgtgttttggaagggttccctggctggggttgtggctttagtccgctgctgaccctgngtgatggagagtttggtcccctcgatggactgccac

SEQ ID NO: 538 - DNA, 485 bp, HUMAN
gttttttttttttgttttctcacttgatttcattaagctgatcttcagtctctgatatcctttcttccgtttgatcaatctggctattaatacttacgtatgtttcacgaagttctcgtgctgtgtttttcagctccatcaggtcatttatgttcttctctaaaccggttattctagttagcaattcctctaacctttttttaaggctcttagcttccttgcattgggttggaatatgctcctttagctcggaagagtttgttattacccaccttctgaagcctacttctgtcaattcatcaaactcattctccatccagttttgttcccatgctggcaaggagttgtgatcctttggaggagaagaggcgttctgggttttggaattttcagcctttttgcactggtctctccatcttcatggatttatctacctttggtctttgatgttggtgacatttggatgaggtccctgagtggacatc

SEQ ID NO: 539 - DNA, 428 bp, HUMAN
ggtagatgcatgacttgtgtgtgatgagagaatggagacagagtccccggctcctctactgtttaacaacatggctttcttattttgtttgaattgttaattcacagaatagcacaaactacaattaaaactaagcacaaagccattctaagtcattggggaaacggggtgaacttcaggtggatgaggagacagaatagagtgataggaagcgtctggcagatactccttttgccactgctgtgtgattagacaggcccagtgagccgcggggcacatgctggccgctcctccctcagaaaaaggcagtggcctaaatcctttttaaatgacttggctcgatgctgtgggggactggctgggctgctgcaggccgtgtgtctgtcagcccaaccttcacatctgtcacgttctccacacgggggaga

SEQ ID NO: 540 - DNA, 590 bp, HUMAN
ttttttgtatttttagtagagacggggtttccccgtgttaaacaggatggtctcgatctcctgacctcatgatccgcccgcctcggcgttggcctcccaaagtgctgagattacaggcatgagccaccgtgcccagccaacaacccctctccttttatgtatggaacagggcactgggaccagagaggacaaggggctagccggggtcagataattgggaccagaactctaacccttggccatgcccattccaaggagggaagccaggagatttgtgtctgcctgtcccagaggtaagaggccctccagccaggccactgtaaggaggctggcccacctggtgcatattccatggcgatcataagggctttgtcttccaggaagttctcgtagtactcaatgacattggggtggttgagcagcttgaggacctggcactcattctgggctgcctgccgctcttccttggtcatctgttccactggaatctgcttgatgatcaccagcttctggtcagcctttcgcaggcacaggtgcacaatcccgaaagcacctcttcccaccactcggatccgctcgtacttctccat

SEQ ID NO: 541 - DNA, 421 bp, HUMAN
ttttgcattttcactgaagcatttattatgcaaaataggaaggctttagcatgccagtataaattaaaacagtagaaaaaaagcagagcagagagcgttttccatccatggcctgtgccctgtaatgacgcagcagtatcctagtacattgacgggtttttcctgtcctgccactgtccgctgggcagttataggtcccaagtgttgggtcttcctgcgaggccttcacaaagatgattttgtcattcgctgaaagtggaagtgaatcaacggcctcctcttgctccgcagcactttattcacactgtgtaaccacatgttttttatgccactttgtgcacagctcatcaaggtcagtctgttcatcttctggcccctgtagcacatggtacagttcaatggtgcggcacagaggcctgag

SEQ ID NO: 542 - DNA, 507 bp, HUMAN
  misc_feature (1)..(507): N=any base
tgttatttatttatttatttatttatttatttatttatttatttatagagacaagggcttgccatgttacccaggctggtcttgaactcttgagctcgagcgatccccacctcccaaagtgctgggcttacaggtgtaagccatcatgtccagccgttcagatattctagttgaattggagttggtgggctagtacaccttctaaattaaatgagtaaaggatttagaatggtgcctgacacacagtaggtgctacattcatgttagctactattataaacctttcctgcctctgactttcagggtcttgcccaccaccagcgatgcccagcccttggtagagcttgaaccaccttctataaacaggatggcggtggagagacaggcccagtccctgagcccatgaggagtgtggccccttcaggcccaaagatggtgaacatcactgcagacaactcctcgatgagctgtaccatcgaccataccatncaccagacgctggncccg

SEQ ID NO: 543 - DNA, 430 bp, HUMAN
cctcgccgccttggggtctgggcgcgcggtgccgtgggggtcagcagggcggagcggcttttccaggagaaagggccctcacgggtgagcggggcgactgggctcccccgcggtgcagttgccccgcgggcgccggccccggctcaacggattcttctcgctcgctgcccggaaagaaccatttgggagagcccatggtgactgcgtgagtggagcccagctgtgtggatgccccagcatggatgactacatggtcctgagaatgattggggagggctccttcggcagagctcttttggttcagcatgaaagcagtaatcagatgtttgccatgaaagaaataaggcttcccaagctttctctatacacagattctaggaggaggctgttctttagccaaatgaacaccctatattgtgccttcaagatc

SEQ ID NO: 544 - DNA, 339 bp, HUMAN
ttttagtcgaaatgtttgctttaatagcccccaaagtacatattaagctttcaactctcccccgcccccctccccttttttttgagacggagtcaccaggctggagtgcagtggggcgatctcggctcactgcaacctccgcctccagtcaaccccattttgaaaagggttttaaggggaaggagttagaaagggcccagtgaaggaggaggtggggctctgggggtggggggaatggcctccgagcagggggagggagagacagaaacttccagcatttctaaatggcgtggggtttgccctggagccggcggcggtgcacgagtaggaagtccttta

SEQ ID NO: 545 - DNA, 460 bp, HUMAN
  misc_feature (1)..(460): N=any base
gtggcggaggccagccccgagcttgcccagcggtgcttcaggcagggaggggccaggcccgccagccaggcgaaggcgcaggcagcgcgcgcggggcgccgtaggcaccgggccaggcgggcagccgccctgggcccgggaccgcgtacgaagccgcagcggcacacgctgatgagcgcggcgaagaccaccgccgcataggtggacacgtagtaggtggccccggccgcgtggcaggcggcctccgggccaggcccaggtagtaggtgagccacagctgcagcgtgagcgtgaagaactcatcaaccagagccaggttgaacaggtagagaagcagggcctggcccaggcgcccgccgctgcggatgaacattgccagggccgncacgttggctggcagccccaggcccagtgccaaggcataggccgcgggcaccacgatgaagcgagcagggtcatc

SEQ ID NO: 546 - DNA, 450 bp, HUMAN
tgagatggagtctcgctctactgtagcccaggatggagtgcagtagtgtgatcttggctcactgcaacccctgcctcccgggttcaaggaattcccctgccttagcctcctgagtagctgagattacaggcgcccaccaccacacctggctgatttttgtttcttagtagagacagggtttcaccatgttggccaggctagtctcgaactgacctcaagtgatccatccgccttggtctcccaaagtgttgggattacaggtgtgagccactgtgcccagccaagttatatctctaaagcaatgtgcaaaaataaactgaacttgggttgattaggtatattcaacatttgtcgggagagtagatgtttcattttatttcagtccctgtgtaatttgtcttctctaatgttaaatactatgtagaatgtgtctgtgtaattttatagata

SEQ ID NO: 547 - DNA, 431 bp, HUMAN
ttcactttacaaatagtttatttccaccttcacaaattcatgcgcctctgaccattatgcaaggcaacatgaattaaatacttatgtcagaacatatttgtcttacattattcaagataaagtggattttaaaagcaagtgggtaccaatgatggggagatgaggagaatagggcaggcagcaacagggcaacatgcatttttcaagagtgtttattaaaataggcagtaatcagtacatgtacatcatatgagcagtttttcaaaattagcacttccaggagaggggctacatctcagttttttctgtctgtacagtaaaatgccaaaagtacttccctaaagtacaaaggcatttccctagtagtcttggtaccagtaacaatatgattactaaacatctccaatgtggttttcattacaaagaaacat

SEQ ID NO: 548 - DNA, 658 bp, HUMAN
tttttttttgagttggaaacaactttattgatacctgagaaaaagtgcaggaaaaatattcctcctgaccaggtggcctgtcccctgaggccagatcattctctcgcctctcccttaagccctgggtcatttgggacctcactggccagcacccagaggctgggtcacaacaccccctgaggagaggctgtcactcaggtcagggccacctgaggtttcaggagtactccccactggccagggcaaaggtgggcccatggggctgagccccaaggatgtgtgagtctgaaaatctgtcagtgacaagaccttgccatcgagaaggaagccagtagcagcatccctggcccggggtgacaagtactgggcagtggctgctcggtgctcagggtggaaccaaagagggttcccctccaggtagagcttgcggagctcagccagcagccacagtggtgacagctcccggtgtccttccagcaggttgtatgccaaatccaggtgccgcagattcctcagctgctctaggccatgcaggctccgaagctcattgcctcgcagtatcaggacccccagagcagcccctgagggtcccattcttggcaccaaatgcaggcgattataggagatgtccagatggtggagctcacacaaatccatc

SEQ ID NO: 549 - DNA, 556 bp, HUMAN
tttttttttttgtcttcagcagtgactttatagaagtatctatatatatacatttagtacaaccgacctttggtttcttctctcaatccccttttcaaacgtatataaaaatatccaaaggctcctcccagcccagtgtttccaggcagcctttcaaatcccctctttgccttagttggtcaaaagcctgtggatgcagcacccttccaggaagggagaggaagaaagttagggctccttcttggcagccttgggaaaccatcggggtagagccccaagcctagaggcgggagcctgccgtccttccatcttgccacacatgggcacatactttcctgttccctcttgccctggaaggctgagcctgcagtgagggaagtggagtccttttccctgcaggggtcaagagagaactcccttcgccaggcgcggtggctcacgcctgtaatcccagcactttgggaggctgaggcaggcagatcacgaggtcaggagatcgagaccattctggctaacatggtgaaaccgcgtatatactaaaaatacaaaataaatt

SEQ ID NO: 550 - DNA, 454 bp, HUMAN
gattccaagatacacattttttattattgtaacttctctgaaatcagatattttgatggtgtcccatagtgttttttgtttcttactatttcataaaataaaggtgcatcttaagaatgatggcatcatagatttgatacaaaaaagtacttaggtgactcattgccagctcacagacatgtttgatgctcagtccagctcctggcgtggtggcacgtgcctgtaatccccactcctcaggaggctgaggcaggaagatcacttgcgcccaggagtttgaggcttcagtgagttatgatcgtgccactgcactccagcctgggtggcagagtaagaccctgttttgcatctctcaaggatgtgccatgaagctgtagccaggtggaattgtaccacagccctgacatgaacacctgatggcagctgctgggttggagccttcaaggcctcactc

SEQ ID NO: 551 - DNA, 439 bp, HUMAN
tttttttccgcataactcttttaataaataaagcatattcatggcttaaattttaaatcacatttacagatgagggaaaacttctaggcctaaacaggtaacagtaaagcgactactgctggaaagagtggtgtgccacatgcgccttaagcctcaagagtggggactgcagggccaaacaccaaatacatcacctttaggccagacggagagtggagacccaggaagcccatgcaaccaccatctcttgctctgaggactttgagtctcgcttgattcatcaaattggacatctgaattttcttctgctgctcaatctgtttctctttcttctcataatattccataatctttagtctttgggtttgcacaagccgacctttctctatgttgaactcttcttctgcctttgcatctatttcttctgctttctcattgg

SEQ ID NO: 552 - DNA, 663 bp, HUMAN
ttttttttttctgaggtaagactttattgtatacttgggtggggtagcccagatggatgcaaggttgcaggcatgggaagcagccctcttgggtgtcactctgaaaatgaagtagggtggtggccgcacctcgccagtgaattagtcccctaccaaggtcttacagacccacccttcctctcaccctccagttcccactgtcctccaaggagaagagccttgggtaagtgtccctccctccttcagagagtgggactgtctgcctcttgaaagcgaggattgatggtggtcgtgatggcacttttgtagagaggattactgtcctgcttccagttgagttgttgctgctccttctcaaagcgactgtattcccggcggtcatagatttccaccgagagccggtaagccaggaccagccccagccccactgccacgatgccccctacgcagcccagcacaatggcctgcgtgtggtctgctcccttttcttgggtctcactctgagcacgaccgtgcctctggcgtcatcctccaccaagaagaagaacagctggttgtccagggtccgctcttttcaccaggcatcattcaggataagggccaaaggccaggtcacattgttatggcacaagctgtactggagttggtggcaaggggccgtcc

SEQ ID NO: 553 - DNA, 789 bp, HUMAN
  misc_feature (1)..(789): N=any base
ttacattatcctagaaaacagaataattggctttatttggtatcttcaagaagcttctccttccgtaggagatgtaggtgttgtgggagaaactgtaactggttttcgtgtaattctgtctagttctgcatgaacatctaagacaggcttctggcctgactttttggtggatggtggtaaaccactgcttccacctccagccccacctgcagggctaccaccactcacaccagggcctcctggagagccagtctttntactcaacaaactgttgaagaaatttgccagaacgccttcacttgtagctccagctttcatgtttggatcaattttttttgacccagcaggaatgggtgacacgctggcaacattagatgatacagatctatttggtgttcgtggggagcctcctgggactcttggtgaggcatccacaggccttccagctgcagttggtggttgctttgctaaaagggactgtagcttcataagaaacacctgatcatcttctgccataatttccttctcatgtacaaactttcgaacaggtggtttagttatgatgtcttcaaattatcttctgcttttatgtttgaaaatttcatgtaatattcctattttcttatcattatcccacccctgctggataaatactgcatncttttncnnacacacagcagggatcttatagggaaatccatatagnttctgaacgatgtattatatactaagnctataattntgtngtctttactgaagtgaaataagtgctgcaccatactgaaaaca

SEQ ID NO: 554 - DNA, 452 bp, HUMAN
gccgtcgtctgtctggtgaacatctttctcaccgggagactcagcagtgcggttcctgcaccgctcatggacacaggcagcaccagggcggccggagacaggccccccagtgcccccggccgtgcaccggaggtgggaccttcagggccacccttgccctcgggcctgcgagacccagagtgcaggcccgtggacaaggacagataggtctgcagggagccactggcagacggcccagctcctgcagatgcacctcgggagccctgctcagcccaggacccgcacccccaggtctccactgccagcagcaccctgggcccccactcgccagagccactgggggtctgcaggaaccccccgcccccctgctccccaatgctggaggccagcgatgatgaggccctgttggtctgttgaccgctgggctcgctggtgaccgccacagccccgct

SEQ ID NO: 555 - DNA, 428 bp, HUMAN
tttgattgagagtgtgatcatgtttccaggtgagaccctattgcatctggcagcccgaattgggcaacaattcctgcaaataagaagccactgctcttgttaggtaggtcatcgtcccataagccccactcggagcgctgtcataaaagaagtggcagattcctgtggcttggtctttctccagggtgtccatggcaccaattgacacctggtcctgcaagaacagctgactggccatctgcacgatctggtccacgtggatgatgcccccgatgctggtcatctccgtgtccgagagcagcgtcagcaccatgatggcttccaccagcagctgccggtactcgggctgcggcacgcggttcagcaccgattcgacatggacagcaaacttgatctcatgcggggtcatctctcgggtcgcgtaacta

SEQ ID NO: 556 - DNA, 505 bp, HUMAN
gtgagcaatagttttttaatcacctggagtcagcaaaaggagatggggtggggcagttttataggatttgggtaggtagtggaaaaattacagttaacgtgcgttttctcttgtgggcaggggtgggggtaacaaggtgcttggtgaggagctcctgagactcattgtccaggagaaggaatgtcacaagatcaattgatcagttagggtggagcaggaacaaatcacaatggtggaatgtcatcagttaaggcaggaactggctatttcacgtttatggttcttcagttgcttcaggccatctggatgtatatgtgcaggtcacagggttatgatggcttagcttgggctcaggggcctgacattgaggattcttttttatcttcctctgatgctcttctataagaatgaatcggatgaagtgagggtctcaccccaacgcggccttagcttcctcggaaggaccgaacaccttggcggcagccgaggaaaggggttccacagt

SEQ ID NO: 557 - DNA, 480 bp, HUMAN
tttttttttcttctgggtattataatctttattacaaaacaagtattttatgttgaggtaatatttcaaatggtatttgtcaaaaatcaattgaatcttacatacagaattttgctctgtaaaggactcagagaacagttttcttctagcattgcacgcaaactgattttagaaaaaataaagctaaaaagtatctacgtaaagaggaatttctttctcccactcttcctgacccaatccttcttatcatcaccagtgattagtaaggtgatgtttatgggagttctacaaaaaaaaaaatgatgaattggtaaattaattgggagaaaaagattttcttatccaaaacaactcactgtgccataatttcaaagtgcttttgcaaactaagtattgaatcctatagaatttactattatttatcccaagaatagaattccccggtctccaatgaggaaaccctatgcaaccttccaactc

SEQ ID NO: 558 - DNA, 456 bp, HUMAN
acaaaaaaaatttacaagtgaaatgttactacaaaactttttataaggaatttttgcaaaacatttacattttaccatcaactatttctgttttaaaatcattatgtagatttaataccctatgctgcacatcaatttatgtgggatgacaacttagtgacatgcataaaaaaacaccacaaggcattaaaatggagacttaaatacaaatattgttgcaataaaacagttataaaatttaaaaataggacctaaacatcatgcttatctaagtttgacaaattaactttttctcctagattacacacttttattactgctctcatgagagtgtgataaatgacttaacatcaagttctaatgtaatcagcaacacatacacaaacctaaccaaagaaagtatactgtaagaaaaaactattctaacactggagttttaccatgataaatacatag

SEQ ID NO: 559 - DNA, 413 bp, HUMAN
ttgtttttgtgcttcatgtttattttaggagagtattggggagcggtctggtctctcagggatggcactctgtgggtctgtatcgcggtaggagttggaatgaggtgcagggtgggcttcaggaatggctggatccaggtatcatgttgctgactgtcatgattcgggctcatttgtaatacggcctctgtgtgttgaggtcgctgtagacatccgacctctgaccctggagctcctgataaggcgactcggtctcagtgatacgctgtttccgggtcgctgcctccgcagcccctcgcccccgagggaccagccggcccaggaagtacacggccagggcaatgagcactgtcagcaccaggtctcccatcacgatccctgccagcacgcccgggctcaccgtagagcaactg

SEQ ID NO: 560 - DNA, 680 bp, HUMAN
  misc_feature (1)..(680): N=any base
tttttcaggcttccgggtctttaatggggcgggggctgggggcagttcatccagaggtggctccgaagctgaggtcaaccttggcggctggctcgcctactccagggccttcaccagggcctcgttggcctcgattcggatctggatctctgcccgcgtggcctcgtcagctgtcctcaccagctccgcctgggccttctccaagtttgccttggctgcccccaggtccaacatgtccagcgtcacggcctcttcggccaacaactgcaccgaagaatcggcgttcactgcgatggaaccgctgctcacaaagtatttggaggtggtgccgtcctctgcatgcaccacgaccagccccggccgcaggacctgcagcgtgggcacgtgggccgccaggatgccgaaggctccggtcagcgtgggcacgtccacctgccggacgttggcaccgttgaagaacacctgcgtgggagaggcgaaggtgaaggacatctggttgtggccagaggcggcagccggggcggcggcggcctcggcataggcacgggcgtggcggacgaggcggtcaagtccctggcggcggagcagcgcggccggcagcatggcagcggctgtccggcaggatgcgggtagcttgctgacagcgggactccgcgcggcgcgggcggcctgnatggcga

SEQ ID NO: 561 - DNA, 466 bp, HUMAN
atcttaactgcaaatttatttcattgattttaacatttttgattttaacatataaatacaagaaaattaaataaatcagaaaagaaatattgcaaagacaagtcagcactcacagaaatgtgtattattactatggttagtctgagatccaacattcacttgaaatatatgcaagagaaccttagtgaaagacttaactaaaaggggtttgaaatgttcctaataaggatgtacttgaggcactgctcaagcagatgtaggtaggaagcaagatagaccctgtatataactaggagcaatcaaggctcgatacatgtagcaacaatagcagtgtaggacagttccctgttcccaatagctactccccttgtcactgtgcattcttcaagacacatttaaaaaacaattatagctctggctgggccagagtgtaccagtcataacaatcaacaatgtaccatgcagt

SEQ ID NO: 562 - DNA, 483 bp, HUMAN
  misc_feature (1)..(483): N=any base
ttttagggctgagaaaatattcagtttattaaatattgtgaatgggtggaatatcagatacatcatctcaatatgtaaatatcctatcccatctcaacatcaaatttagattacctggatttcttctttgcttttctctatgattacaacagagatcattatgtattttattagtttcttcagtctttaagatattttttgaatgatgttcaaataaactccaagttatctccaactttttctgaacaaaatatttccattcttaagatacaggcttgtaattcacatacttgatgctactcaatggcgtcttatctgtattttcttctcacatttgactccagagtattcagtgcggcaggaacacacattgggaaatatgcatctgcctccataaagacattntgggttgcaaattggtatttgacaccgcactccttcccaggaggaaggacaatggcatatgctgggcgcaatgcattc

SEQ ID NO: 563 - DNA, 383 bp, HUMAN
caggcacttttttttataaaaacgcatagtctcatttttcactctttaaaatcacattcaaaaatcggcaaagaaacgccccggggaatgagtagacgggaggggagggtgcgccaacccagccccgggggggagaaggcgcgacaccacacaggcagcgcgactggcacgagggggcatgcggtgggcgaggcggcggcactgacaggacgtgggctgtggggctggccagcctccttgctgtgctgcccgcccacctggccggccccgtcctgggcagatggggtcgcacccagcccagcatcagcgagacctcaggccaggcgaggccagtatggcccaacctgcaggtgccttgctgtggtccctgagcccgggtgctg

SEQ ID NO: 564 - DNA, 611 bp, HUMAN
ttttgagtcattttcttgttctgtcaccaaggctagagtggagtggcacgatctcagctcactgcaacctctgccccctcggttcaagcaattctcctgcctttgcctcctgggtagctgggattacaggcgcctgccaccatggctgcctaatttttgtatttttggtaaagacagggtttcaccatcttggccagtctggtcttggactcctgacctcatgatccagccatgtggccgcccaaagtgttgggatgagaggcgcaaaccaccatgccccgttctctcccacaatctttagagaaacattggcctcagacctcatggcctataccctgccaagtaacaactgtgccttgttgcagtacatagacgagctttctttgcctgccccaacctgagaggagtgttatcggggaacccaggatctcctccatctcctatagaaagcaagttacaaaatatcaaaaaagaaagcccaaattttccatgaagaggttacatatctaggtgtcatattgagccacgaggaacactggtttggctatgagaagaagcaagccatttgtgcacttctaaccccgactacgccgatgacaataggaagtttt

SEQ ID NO: 565 - DNA, 430 bp, HUMAN
  misc_feature (1)..(430): N=any base
tttttttttttgtttctcactgcctgtataatcaggtctttattcaaaagaagctgtccaaaatgatttgacctttatggaataatcaaatttaagagtttatgcagcaggctttcttctcctctgtataggttttttttctgcaggcttcttttcaggggctggtttcttggtagctgctgccttttttcccaccagaggcttcttctgcttcttaacaccaacagcatccttctttcctttcttacctaccacaggcttcttgcctgcaaccgccgccttctcatctgatttggcttgtagtgccgctgctgcagcagctgccttatccacccggagcttgtgattcctggcctggcgaaaaaatgtgttccggcgcatggtctttgcatatgggttagcttcaacatgattctcaagttttcagtgg

SEQ ID NO: 566 - DNA, 472 bp, HUMAN
gggtttggagtagtacctgcggcgtgctcgagactccgacttcggtcttgcggcgcgctcgcgcccgcgggccatgccccactgactctaagtgggcactgccccggctccgggagggcgagaccgagcgccggccatgggaagcttccagctggaagactttgcggcgggctggatcggaggtgcagccagtgtcatcgtcggccaccctctggacacagtcaagactcgcctgcaggctggcgttggctacggaaacaccctcagctgcatccgcgtggtgtacaggagggagagtatgttcggcttcttcaagggcatgtccttccccctcgccagcattgccgtctacaactccgtggtgtttggggtcttcagtaacacgcagcggttcctcagccagcaccgctgcggggagccagaggccagtcctccccgcacgctgtcagacctgctcctggccagcatggtg

SEQ ID NO: 567 - DNA, 623 bp, HUMAN
cagatagcccaccaggggtggggagggtgagcagggacagggcgcccccactgacttgggaccctcctcctccaggcccacacctcagcacccaggacatctgggccccccgcccccagcgctgtctagtttggttgcctggccgtcactcccagcctggttcccactcctgtgtcttctggggatggccctcaaggacagcatgttgacacatcaggcccagctctatcactggggagggagataggctgccagggacagaaagggctctttgagaaggccactctgcctggagtgggggcgccgggcactgtcccccaaggtcgcggcagaggagataggggtctgtcctgcacaaacaccccaccttccactcggctcacttaaggcaggcagcccagcccctggcagcacccacgatgcgggacctgcctctcaccagcctggccctagtgctgtctgccctgggggctctgctggagactgaggccctcagagcagaggagccagctgtgggcaccagtggcctcatcttccgagagacttggactggcctccaggcatcccacaagagcctctgtgcctggtggcactggggcgggacagcaatggcagcagctccc

SEQ ID NO: 568 - DNA, 516 bp, HUMAN
ctgttactcagggtaactgtctgctctttcattgtgcccagagaccacatgttgaaaaatgtccttgggagcttgaacttgtaaccacatggcagttctttctcttggtttccaccatccaacagataggaatttgggggttcatgtcatacttatccctaaaaattatcttgaacagttaaaagactttgcaagctcagaattggctgctctaaaatccttctgggaagaacaacggaaaccagccaatgctgtagctcaatagctaaggcttcaccattttacaatggtggcccagggttcaatcctggcttagggaatgaatcctttctggtttaaaatctgtataacctttaccactggttaattctcttcctctccacaaaccatcttgaactttcctttctctgagcaaaaaatatcggctgtttggcatggctaaagtcaggtaataagatatttaaaaggatttgagtgctatggttaaaagtcagtttgttcaagctctaacagcct

SEQ ID NO: 569 - DNA, 743 bp, HUMAN
  misc_feature (1)..(743): N=any base
tttttttttttaaaggaagtcaaaaactttattcaggtgataaaattccatgttccaagaacatgctctaagcatgcaaaaagcacaggacactgctcccgggtgggggctcaggtggggccacctctgaagctctgctgacccctgggccaaggccctgacagactagcaggcccagtggtcatgaaagcgtgacggccaccacatcacaagcgtgatggcacctgcntggtgcagctgcagtccctggtgggccgggcactcactctggcagccgccgtcccccacgccagccatggttgtcccgccatacgcagtagttgagtgtggtcgtgaaggccagccaggccaggtaggggtagagcaggcgggcggccagcgggctcacctggtaccaggccacggtagtggctgccgccgccccactgaccagcaggagatccaccaaggcccagcccatttgtcgggcaccaaagaagatggggggccatgcccagttcagggccagctgcccagtgtagaggcccaggggaaccacagccttctctgtgaagcctcccagctctttccagaaccagtaggagccgtaccccatggctgagtaaagcgtgccccagacagggcccagcaccagtgggggcggtgccacgagggcttctgcagggccgcgtacccacggagacccctcgccgtgacaaagcggagcccacgaagcacccccagctgggcggccacgtgaagcc

SEQ ID NO: 570 - DNA, 446 bp, HUMAN
ttcagttcaacatacatttattaagcacagatggtataggatactgattgcccccccagccctctgtgctccccccacgcacacgctgtctatgtcgattaggctgctgtgccgtcggttcccttcttggtctagcagagccttcagctccttgatctgctcagccaactccgggttcaagtcaaactccgctgggaaggcggagatccagtacctgaccaggtggcacgttttcacctgcagggaattggagttgtccttccgggattgttggtagatgtggagcagcttggccgccagcgaaggcttcgatgcacccgcggagcagctcctccaccgtgcagcccttgtccaggtccagggtgcctgccatggccgcccggcgcgggtgggctgggcccaggctgcgctccgggagcctcccaccgggctcggaccgaacccct

SEQ ID NO: 571 - DNA, 676 bp, HUMAN
  misc_feature (1)..(676): N=any base
tttttttaaactagatctaagaaagaaaaagtcaacactgatatacatgttgcttgagccaaaagacataggaaaaaaagacaacatataaccattaaattcctaagaaatatgaggtaaaaagatgaaatctttagataatttctaagtctgtacaaaaaagctagatttgctactctccaaaaagtggaaggacctattatataatatatggaaataatttaatgccatatcataagaatgtaactagagctgtgctaagcttcatattcgtgagggcatctaaaatgccactccacagcacaggtgcttctctcttctatccatttatgcggtagttttcatggatttctggccgaatgtcacagacaaaagccaagaggttgtccaagacttcatccctgttctgccggaagtatgtctggaggatggtcatcttctcctgggtctccttctccacttcagtgctgcaactgccacgggatcccaatgccgcagcttccttggccttgaattctttctccctctgcaggcggtactgttcaatttcagcctgagcttcttctttggcctgcttcagcctccggttctttcttttgcgggcctcggacaccttctcggctgcccgcttctcggcctgcagcagctgctgaatccnctgagactgactagccat

SEQ ID NO: 572 - DNA, 501 bp, HUMAN
  misc_feature (1)..(501): N=any base
tttggccattcagtggccaatctcctctccaactgtccccagccgaactcttctccgtgttcacacactcctcttctctccgccaggccattctgccattctgctcttctgttcatctcatctgcttgtggagcctggggtttggggtttatacgggtacaggataggggagcatggcaggtcaaaaggcaacttttgggggcgaaaacaggaatgcctgtcctcatttagggccgcaggtttccaggcttgagggtgggcctttgccagggaactgccctcttctatccagtatttccctgtctcctgtgtgtatcagtgacaccctgtctctattaaaaatacaaaaattagcctggcattgtggtgcatgcctgtagtcccagctactcaggaggctgaggcaggagaatcgcttgaacctgngaggtagaagtttgcagtgagctgagatggtgccactgcactccagcctgngtgacagagcanagctccatctca

SEQ ID NO: 573 - DNA, 494 bp, HUMAN
agtagagacggggtttcaccgtgttagccaggatggtctcgacctcctgagctcatgatccgcctgccttggccttccaaagtgctgggattacaggtgtgagccgcttgcacctggcctaacatctttctatggaaggctgaatgcataattacaacaatctgatgagccaaagtgttgatagcagtagagggcagacaaattcctaggcagacaggggcaggtccccaatgaaacctgatcttcaagccatagacagcctgaagcctgaaaaccaggcagccagctccaggtagagtccatgacctgagtgagaacttccttgatgcttttatagccaggcaaatggtgctttttccaggactgcttatggaccaatcagcacacactcccccattctgagcccatgaaacccctggactcagctacatgttgggactacccaccttcagatatgggttacccacttcgggtcccctctcatgtcaaaaact

SEQ ID NO: 574 - DNA, 420 bp, HUMAN
ttttgagttcttcaaaattatttattgatgcgtggagggaagcacaacccagagaactgggcttggctctcagctgtgtgtgtatagcacagtctcaaggctagctcttgacttctaggaaggtctttagggtcagtagggcagataattacagcaaagtatcattgtatgtggatctactctccctctccaggcggaatgtttgaaccccaaccgggccccggcacacgaaagtcacatggctccccagggggatcacggtgcctggctcagccgagatggagggtctgggcagatcttcctcctgcgtgtggatggtctgggccaggcagagcactaggcccaggagggcggtggggtggggagacatggcccaggtcccagcagtgcagcctggcctgaggcgcaccaatgcaagga

SEQ ID NO: 575 - DNA, 464 bp, HUMAN
tttttcaggtatcaaggctgtttattgactcttcgcagccagcggctcttcctctgcccctctgggatgcctaatccccgtctcccccctggagccaagtggagtggctctgagcttgaccccaggcgccttcctcttgccaggcttccctgccccgcagccttggccttcctggtttgccacaggggctgttactcctttgattctacatcctcctcgaagtgtgtgaggtaggccatctgagccgaatcgcgcgagccatagagagtgttcatgctgtaggagctgccatggaggcacagggctttggtaacattgactgtgttggccgccaagatgtccgcctgaatgctgtctattttcatgtacaagtcctcagcgttgctctgaggacaggagcaagggggacccggctggggtgccagggcagtctggacttggagttgggcttggcagagggatgt

SEQ ID NO: 576 - DNA, 619 bp, HUMAN
  misc_feature (1)..(619): N=any base
ctgttgcacactgcaaatggaaagttctggattccacctagggcaccatcgggaggccaatggggtcatatggagacacacgcagatcctgcagcaaagcttctaggttcttcctcagcatggcgtagggcggcttctcctcatacgtgagggccatcaccaccttcaggtacttctgcagggtctctgagggcctgatccagtgaccgcagggtcccacgaagggccccggcttatcaacaaacttctgtttttgcttcatgatgtcctcagtgttgggaaggcaatttgtccatggcagaaacccgtagagccacttcagcatgcagtagcccaggctctggaggtcgctgcggcgggagggcccgcatcccttgtgcaggtccatgctaatgaactcaaggtccccctcgtgagggctcctgctgccttccacgtaggccacgtgtttgccacttgggcaatagcggaaggcgaagccatagcctgccaaagtcacctgactctggtcctctggatccacaaagatattntcagctgtcacatttccatgaacatactcattctcatggaggaactccanggcatccagcagcccgcaggccacctgcagcacaga

SEQ ID NO: 577 - DNA, 514 bp, HUMAN
cagcctggtggctccacaggatctggtccaagctacctttatggggtcactcaaccaaaacacctctcagcctccatgggtggctctgtggaaatccccttctccttctattacccctgggagttagccacagctcccgacgtgagaatatcctggagacggggccacttccacgggcagtccttctacagcacaaggccgccttccattcacaaggattatgtgaaccggctctttctgaactggacagagggtcaggagagcggcttcctcaggatctcaaacctgcggaaggaggaccagtctgtgtatttctgccgagtcgagctggacacccggagatcagggaggcagcagttgcagtccatcaaggggaccaaactcaccatcacccaggctgtcacaaccaccaccacctggaggcccagcagcacaaccaccatagccggcctcagggtcacagaaagcaaagggcactcagaatcatggcacctaagtctggacactgccatca

SEQ ID NO: 578 - DNA, 614 bp, HUMAN
  misc_feature (1)..(614): N=any base
tggccctgaacggctggggtcactgatatttattgcatacaagacatgggggcagggtaaggagggtgaatcttctaagtgattgacaaggtgaagcaagtcatgtgattacaggataggcggcccttcccttttaggtagccgaagcagagagggaaggcagcatatgtcagcgttttcttctctgcacttgtaagaaagatcgaagactttaagactttcactatttcttctaccgctatctactgcgctcttcaaagaggaaccaggagtacgggaggagcatgaaagtggacaaggagtgggaccattgaagcacagcaccacagggaagggtttaagcctccggatgactgcgcgcaggcctggataatatccagccttccacaagaagctggtggagcagagtgttccccaactcttccaaggaaaggagactccctttcgcggtctgctaattaacgggtgcattcccagacacttgcgttaccacttgaccaaggagccctcaagcggcccttatgtgggcgtgacagagggctcacctcttgccttccaggtcacttctcacaatgtcccttcagcacctgaccctatacccaccggttattnct

SEQ ID NO: 579 - DNA, 716 bp, HUMAN
  misc_feature (1)..(716): N=any base
ttgataatagttcattttattaaataatttataaagtcagaccagtgcattgggcttgttaggggaaaccattccttcctactgtcacatagcctggcagattatatcaggtgccaaaacattcccttttattcaatttattaatgagagtgtggaattaaagtagatccttgcatgtcaggaaagctgcaacacatctggtttaagtggagcacaaaggtaagttattccacattcaccaacttccccacttgacctcccaccagttcctgtctgctttttccatcaatcaactctaagatgccctaaacccaaacagttcccattcaactgtgcacaaaggtatagatatggaagacatctcactccaactctcacctttggaattaaataaacctggaacagggaaggtgaactatggctgaaaccaagtgaagatttttaagaagctttgacagaaacattaagaataacacctgaatgcanatccagaaaaaagcgctactgggggaaaatagtcttagccaatgttctaaaaatgctcataagggagggttggggaattaccctttagacacaagctctaagaactctggataccaacggaacttggatggatacagtctgggcctgctgggncagatgttccgagggcggcccggcaagcagcctgtcttgcacatttgcactgactggcttatctacggcagagtcct

SEQ ID NO: 580 - DNA, 332 bp, HUMAN
  misc_feature (1)..(332): N=any base
agacagagtctcgctctattgcgccactgcactccaggctgggcaacaaagcgagactccgcctcaaaaagaaaaaaaaaagcatgggtttgtgtaccaaacctcagtcctccatcatcctccctgtacctcctttttcctttttgttgagacaaggtccagcctgggtgacagagtgagactccatctgaaaaaaaaaaaaaaaaagcatgggtttttgtgtaccaanacctcagtcctccatcatcctccctgtacctcctttttccttttttgttgagactccatctgaaaaaaaaaaaaaaaaaacgtggggggggccctccaacatc

SEQ ID NO: 581 - DNA, 543 bp, HUMAN
gaacccgggaggcgaaggttgcagtgagccgagattgggccactgcactccagcttgggcaagagcaaaactgtctcaaaaaaaaaaaaaaaaaaaaaaaaaaaagctacaatactcccctcacaaactggaagcctcaagctcttcaccctaaaatagttctgttgaattttaccctggcaatgtaaactgatagcttatctgcacaggtgtgggacagaacccgtccctctgtacacctgagtcaaatgcctatctgactgcttcccctgccctatttatgtaaaaattcagagtcaatgagccagattaaggcataagtgactattcctctactccctctcatatataaattgtgtattcagtgaaaggctgatgagtcactcaaagaatgtgataatttattatctacctgtgacccggaagccccccaattccagtttttccacctttccagaccgaattaatgtacatcttatatgtattgattgatgtctcatgtctctgtaaaatatgtaaaaccaaactgcagcctgaaaacct

SEQ ID NO: 582 - DNA, 471 bp, HUMAN
cttcacagattttcctaaagaaacttctgactccctttcccttaccctttcctcttcttaatgctctgttacgaaagaaaaagctgatgttgctgttgagagtctcataccaggactggagcccccagttccccagcgcctcccatctcagacggaatctgtgacctcgaatcgcacagattctctcaccggggaagattccctgcttgattgctctctgctctctaaccctactactgaccttctggaagagtttgcccccacagcaatctctgctccagtccataaagctgcagaagatagtaatctcatctcaggttttgatgtccctgagggctcggacaaggtggctgaagatgagtttgaccctattcctgtattgataaccaaaaacccacaaggtgggcactctagaaacagcagtgggagctctgagtccagtcttcccaacctagccaggtctttactgct

SEQ ID NO: 583 - DNA, 512 bp, HUMAN
gcggccgcaagacccgccacgacccgctggccaaatccaagatcgagcgagtgaacatgccgcccgcggtggaccctgcggagttcttcgtgctgatggagcgttaccagcactaccgccagaccgtgcgcgccctcaggatggagttcgtgtccgaggtgcagaggaaggtgcacgaggcccgagccggggttctggcggagcgcaaggccctgaaggacgccgccgagcaccgcgagctgatggcctggaaccaggcggagaaccggcggctgcacgagctgcggatagcgaggctgcggcaggaggagcgggagcaggagcagcggcaggcgttggagcaggcccgcaaggccgaagaggtgcaggcctgggcgcagcgcaaggagcgggaagtgctgcagctgcaggaagaggtgaaaaacttcatcacccgagagaacctggaggcacgggtggaagcagcattggactcccggaagaactacaactgggccatcaccagagagggg

SEQ ID NO: 584 - DNA, 1172 bp, HUMAN
gtgctgacttgcgggaccgcctggaggaggacccggcgtaggccagaccaggagctgaccgggagctggggccacgggcctaggagcaccctggtcagggctaaggccatggccccgcccccaccgccactggctgccagcaccccgctcctccatggcgagtttggctcctacccagcccgaggcccacgctttgccctcacccttacatcgcaggccctgcacatacagcggctgcgccccaaacctgaagccaggccccggggtggcctggtcccgttggccgaggtctcaggctgctgcaccctgcgaagccgcagcccctcagactcagcggcctacttctgcatctacacctaccctcggggccggcgcggggcccggcgcagagccactcgcaccttccgggcagatggggccgccacctacgaagagaaccgtgccgaggcccagcgctgggccactgccctcacctgtctgctccgaggactgccactgcccggggatggggagatcacccctgacctgctacctcggccgccccggttgcttctattggtcaatccctttgggggtcggggcctggcctggcagtggtgtaagaaccacgtgcttcccatgatctctgaagctgggctgtccttcaacctcatccagacagaacgacagaaccacgcccgggagctggtccaggggctgagcctgagtgagtgggatggcatcgtcacggtctcgggagacgggctgctccatgaggtgctgaacgggctcctagatcgccctgactgggaggaagctgtgaagatgcctgtgggcatcctcccctgcggctcgggcaacgcgctggccggagcagtgaaccagcacgggggcccgcgggaggactcagactccagcacttccagcagcgcctgccctctatggacgacagcccggagctgcccacgggctgcagccagtatgccagggagctgccctcttcttccacaacagctggctctggggttctcaagatttattcaggatcgtgttaacggaggcggtgggaggatagggtccctgacgtgccggggacacacacagagaaccctccccgcccccgcaagggaggggggaggctcgctttttcttaaaaatataaatgtatttatctgcaaaaaaaaaaaaaaaaa

SEQ ID NO: 585 - DNA, 648 bp, HUMAN
  misc_feature (1)..(648): N=any base
tgacttggcccacagagctttattggagagatacacacaaaggctgtccactcacttccataatttcttgatggacatgtttttctcactgtccttctgcatgaccttggctactgccatctcaaagtcctcctgagtgacatggactcgccgttctcgcagggcatacatgccagcttctgtgcacacgcccttcacttcagcccctgatgctcctggcatgagctcagcaatttttctcaggttgatcccccgggtcaggttcatcttccgagaatgaatcttcaaaatgtccagccgggcctcctcattggggggtgggaattcaatttttctgtcaatgcgccctgggcgaagcagtgccgagtccaggatatcaatcctattagtagccatgataaccttgatgttcttggtggcctcaaagccgtcgagctggttgagcaactccagcatcgtgcgctgcacttcactgtcccctccagaacccccctccagccgcgaggagccgatggagtcgatttcgtccatgaagatgatagatggagcatgttcccgtgccatgacaaacagctccctcaccattcttgccccttcccctatgaatttctgtaccagntcagagccagagacacgaaataacgtaca

SEQ ID NO: 586 - DNA, 471 bp, HUMAN
tagcattccatcatgtttattgactcctgggggacaggtcacaaagtcagtttgtgggcaggccagactgccctagaaggaagtcaggggcctcaaggggtggcactcttccttaactcgtaactcttggaggcaagcttggaaggtgctttatttcccgctatgattataccaaccctgtggcctgctccaggcttcaggatctttagggccttcttgcgaacctactggtggggggtgctgcaagcccctccccttgcccgaaggtgccaagccccatgtgggcaaggcagttgtctgttgcatagtcaagtagttgttgtctccaacttgcaccccagagcagttgtatatgttaacgagcggtcgccctgttactggatttggctccggggtcctgcaggaccagttcatgccttgtctctcagccccctgattccctcggggtccaggacttggtgttccagttga

SEQ ID NO: 587 - DNA, 393 bp, HUMAN
  misc_feature (1)..(393): N=any base
tttaaaagaaaagacacctgggcctgggggaccactaccaccaagacgcggagaccagtagtggccccaaatgccaggctgcactgatatttattggatataagacaaaggggcagggtaaggaatgtgaaccatctccaataataggtaaggtcacatgggtcatgtgtccactggacagggggcccttccctgcctggcagcagaggcagagagagagagaagagagagagacagcttatgccattatttctgcatatcagacatttagtactttcactaatttgctcctgctatctaaaaggcagagccaggtatacaggatggaacatgaaagcggactangagcgtgaccactgaagcacagcatcacagggagacaggcctctgata

SEQ ID NO: 588 - DNA, 515 bp, HUMAN
  misc_feature (1)..(515): N=any base
ttttttttacttaaaagataaaacaactttattatgacatcaccattatatacagctgtgcttttcacatcaagttggcttagttcttggaggaaagtcttagtgactaaaattgtacacagatcacaagacaagagaactagtctaacaaattcaataagaaatcaggacaactgtagactatataaaaactgtcttagaaaattatttacaactttatcatagtgtaaatactctaaatgtaaaataaatctatggattttatacaaaaatactctaaagtacaaatgtaagttaaatgctgaataaaacattttcaccttttccagtggatgctattactaagactataatctaggtgtcaaaacttaaagtgataaccacaaagcaatgttttcttaatcactcataattttacatttgttagtagtcatcacaaggtttagagttccactgaaaaagtctcatttttacaaatgcaactcatacactntccttcatggaccctttctctg

SEQ ID NO: 589 - DNA, 685 bp, HUMAN
  misc_feature (1)..(685): N=any base
cagattcctgggtgcaaggtggcctcattagtgcccggagaccgccccatctccagggagcagatagacagacaagggggtgatcaggggcacagtgatccaaccctggcctctgaacgccgcagcggccattccttgggcccagcctggagacggcccccctgcagcaggctaatcttagacttgcctttgtctggcctgggtgtggacgcaagtgcctgtcaattccccgccacctcagagcactataaaccccagacccctgggagtgggtcacaattgacagcctcaaggttcctggctttttgaaccaccacagacatctcctttcccggctaccccaccctgagcgccagacaccatgaaccttccttccacaaaggtctcctgggccgccgtgacgctactgctgctgctgctgctgctgccgcccgcgctgttgtcgtccggggcggctgcacagcccctgcccgactgctgtcgtcaaaagacttgctcttgccgcctctacgagctgctgcacggcgcgggcaatcacgcggccggcatcctcacgcatgggcaagcgaggtccnggcaccccggcctccagggtcggctgcagcgcctactgcaggccagcggcaaccacgccgcgggcatcctgaccatgggcggncgcgcaagcgcagagcccagcgcgcgc

SEQ ID NO: 590 - DNA, 596 bp, HUMAN
tttttttattggaaggggggtttaattgtttagaatttcaaaatagtattgggatgtgaaacaggatgattatcactctgataaaaacaagactgaactgagtccttcactgtatttttctaaagaactcacttctagtgagtaagtgttcaataacataaagttaggaaatctttatgttattaaaatttgaatttttctttcactgtatcccaatattttaaatatgcgcttcaggacatttccagttaaaataaaagtttaaataatatcctcactacattaaaaataagatctttaagtaaacgtatttccaaatcatattgtcattgtgcactgaagttaattctctgaagactaaattatatgcaattgaggttctgtttcccttctaaacgttcctttactaatttttccaaagcgaaaagatgctcatctgcttcttctggcacaaggttcctaatagaatttgcaagttcaaaaagatattctgtatttcttccacttggaccagctgcattaaaaatttgttcagcaatgtcttccagaggtgcaggaccaaagatatcaggattatcacatgttccaatatatag

SEQ ID NO: 591 - DNA, 788 bp, HUMAN
  misc_feature (1)..(788): N=any base
ttcaataaaaagacagattttctttacacagatttaagccaataatttttagcaaaatgatacaaaactgtcttaaccaagtagaagattggtagttacagtggaatcgtcagggagtacagggcggccaccactggagggagctgaggccctggaaaaggagtctgattctctgcaattctctctctgcttttcttcccagccccgttacaaccgagttcacgtggggggccgcagtgcagccccagcggtggcagctcttggagtctgtccgtttagtatgtttcccccacgagcgtcgctgggtgagtggcctggagagctcccggtgttaacatttcgatcctagaccgggggacgtgtcactagtaaagccattggtaacagagtagatcagccatgcattgtctgcccttcacagcaataaggagagttctcatcggtgcacgacagactgaagaccactggaagccacccgaccaggaatccagtgctgccttccgatgggagacgagcagctacttgccgtggtgttcgaaaggaatgctattctgtgaggtggacatgcgagaggtatcttgtcggcctgtgaggtcggacgaggagatgttgacgggggcnccgcggtgcagccgcatactcactttccgctctctctccatgccggagacggggccggggggggagtgtanccgtgtntgaaaggtaggggtanaagggttggaatncacttccaatactctcctaagcgagtcggaatgtgtaggagggaatgcgttagatacagg

SEQ ID NO: 592 - DNA, 494 bp, HUMAN
ttctttctttttctttttctttctctctctctttatctttgtagctatcttctttaggaataaaatgtgaggcaaattgtctgatgcaattcccaccttgactttttcatttggcttagtgatttgggggtcctgagatttattttcctttcacaccatatacagaagaagagtaaatataaaaacactttcttgaacagcaggctagcagcagggaacaggggcatgggtgtggaaagttttcaaaagagtttggcgtgaaagatgccatatatactgttccaacacttggaacacaataactagagacacagttgtgcatgcgtggtgcaatatctggcctgcaggtattctcagtgatgatgaagaacaaggtagtgactttgaaggattctgtatgtcaagttgaaaaaaaagtctgacctcctgccatatgtgaaatatacaccttccgagtctgtcagtaggctgaaagaagaggatatggaagaagt

SEQ ID NO: 593 - DNA, 703 bp, HUMAN
tctcattattcaggcgctccagctctgacacgtgcacttctttattggaaaagaataaagcagtcactgatgtggcaggggcaggacacgagcagctgccgtcctcctcccagcgtgcctggcatggtcgcaggggagcgggtgcctggagtcccggtgacaccacggggcacactgagggagctgaggagccggggccgcgcagcctcctggatgctcagcggatcgtgtacttgtcccacttcttttcagggtcgtagggttcccaccggctggcgggaaagatgtgcttgttcttctcgtaccagctcctcagcaccaccttgcctgcatgggactcatccttctccacagtggcgtcactgagcaaccgcacatcgtcatgaacatcaaagttgaagagtggtccactcttcccccgtgccttggtgacgatgaagtcgtagaagctgtgatgctgggagccaatggcaggaaagcggcgtcttgatggtccatctcggtccgtccccacaccccccgactgcgcacactgtccccatcagcctgagccagagccgaatgtgctgcacccactgcagatactggggctgaagggactcacgtgagggatgatcaagtcctgctagatgtacatgagctgactcacccctgctgacctcaggctcactgagtcttatccgaagatctcgagcgccttctg

SEQ ID NO: 594 - DNA, 782 bp, HUMAN
  misc_feature (1)..(782): N=any base
tttacattttagaccatttaatggaggtatttgttgcacatgtggttttagtgtaacgtaaacacaacatctctccccagaaacacttaacctgagttggaaatgaaatatgaactgaagagattcttaattcacacatacacttctcctcaaaatattagcaatgattccaactgaggattctgcttgaagttcaggactcggtcccaggacaggaatgaaggaaaactccgtgcagttcgaacgctctgctgaagtcaaaggactgcacctgcgggctcttaatcagagctagcttcctcaaacacccgcggaacgaggtctggctgcgcaggcatttttgcttcacaccagcaggatagccaccaacataaatgggattgttggtgtccactgaggtagactgggtgtgtggactttcagcgccaactgcgttcccatcaacaatcagagtgatacggtgtttgcttttgttagcttgaagagtgtgccattntccatcacagagcacagtggcggttntgggctcatatgcagctgttatcctgccagcaccattgttgacatggaacaagaccttgccgtccacaagctctagtccaatggcatgcactatggcagtgctgatccccaggaagacgccatttctgcgagaggttcgaaacttccagtgtgatgtcacatctgactggactttgtagccctctttgacaagagctgcatatncgctcccgcaaagtatgttctttctgggccactgcgtagcacctggtcaccgtgaa

SEQ ID NO: 595 - DNA, 406 bp, HUMAN
gcacgaggattaatggaactacttttgttttgctatgcttttaaagttctaagacaaccctcttctactaccaggttggtctagataactgtggtatgtcttcaagtttctagatgttcataagttcttttattacctaaaacttttcttcttaaatttcagaacaaaacagaaaactttcacagtgcaggttgagtatgccatatctgaaatgtattggatcagttttttggattttggactttttcagattttggaatattcacagagtacataccagttgagcatcccaaattcaaaatctgaaatgctccagtgagcatttcttttgagcatcacgttggcatttgaaaaagttatagaccgggcatggtggctcacgcctgtactcccagcactttgggag

SEQ ID NO: 596 - DNA, 486 bp, HUMAN
tttgcttgagaggagtgtgtggtcattacacggcctcctggcccagctgctgtcacagccccccagtgcgagtgcccacggggctcggggtgtctacacctctagccccgccacctccgtcagcccaaggtgaaaagggccctgctggccctgggcggctgcaccctaggtctccaggtactggtagagctcctccgctgggggcacgaggctcaggtggaccaaaagcacaaccaggagggcggtcagccgcatggccaaggtctccagcctgagcgccacttcaaacttgagcatctcccagacgaccttggcgtggcgcaggaggctggtgccgtagacaccccgatacgtggcgcccgccaggcggctccagccccggacagcccttttagccataaggaagtagcggtccacgggggcgccgagggccacgttgatagcgcgcacggtggtgatgttgcgcagcaccagcagcatgggccg

SEQ ID NO: 597 - DNA, 536 bp, HUMAN
  misc_feature (1)..(536): N=any base
cagagtgactcaatgtcatgttcacatggaagacaacagacaatatcgacatagtctaaaacaatacttccagggcaggtgcagctccctcatgggcctgttctaaaccagcctctaggagttgatccaaacaagacgactacagaaacccccaacaaaacgtgccacgaccacatagcatctgaaaggcaaaacaagacgctggatgttgactttaacatataaaaatactggnaccaaaatgaaatacaaatatatattagaatctgtaagtattctgtataaagagatacttttgcggttaggctaccagcaggcaaagaggagacaaagtccagccttttccacttcctgacaccttcaccgggagccccggccctgttgccagtggtgttgcaaggccacagctccctccggacgcaccctgctgtatctcttcatgcctaaaatgcagagcgaactaggggtcttcacaaagggggacaagatgtggagagaggacttctcagaggggtgattntgcagtagccaccttc

SEQ ID NO: 598 - DNA, 460 bp, HUMAN
atctcctcgtctgccatttgctaagactgtgggaaaagcacagtgtttgggcggggtgtactgattttccatgtacagtctgtcacagcttcccttggctaggaaaggaaaatcccccgacccattgtgcttcctgggtgaggcgacgccctgtcatgcttcaccttgccctccgtgggctgcacccactgtccaaccagtcccagtgagatgaatcaggtacctcagttggtgatgcagaaatcacccgtcttctgcgtcgatcactctgggagctgcagaccagagctgttcctattcagctatcttggaacggaacccagccatttctttttaatcatcacatgttaaatttgaaggaactggcttagtttttagaagagtgatcggtctcattaaagtggagggaaaaataggacccttaaggaaaatcaaaagatagtgacttaatgtagctaga

SEQ ID NO: 599 - DNA, 407 bp, HUMAN
  misc_feature (1)..(407): N=any base
gcttaactataagaccccaaattataaagctactgcaggaaaacataggggaaacacttcagaagaataggcaaatatattttagataagacctcaaagatattttcaataagggtcaacaacaaaaaaatagacaaattggactatattgaactaaaatgcttctgcacagcaaaggaaacaatcaggcagagtgaagagacctgtaggaatggggagaaaatatttgcaaactctttcacctgaggaaggggactaattntccaggaatttaacaagggaaggcaaaaaaactttaataggcagtgcccttggcgggctccttaactgttattccccaggcacntgggggagggcccaagttcagggagggttccantttgagggccaggggggttttccaagac

SEQ ID NO: 600 - DNA, 540 bp, HUMAN
  misc_feature (1)..(540): N=any base
ttaatgttcaccttccatgtattaatttatgtcttngnttataattnctatctccctaaaatgtataaaattaaactataacttgactacctcgggcactttctcaggacctcttgagactgtacctgagccatggttattcatattggctcagaataaacctctttaaatattttacagagtttggctcctttggtcaatagctgggtggtagctggccaaggtgaatctgggctgggtaatttactgatttacaggagtcctgttcgacactagattctcatcttaacagcacagatgcagtgactagttccagattaatacttgcagctaacttggaggtatggctggccgctagtgcttagctgtgcccttttgcatggcgccatccaggggaagnccaaagccccagctcagtccccttcctgcttccgtaccctgttgtgncctctttgaagggccttttctgccatgcttcctccaaggcttcagcctctctcagcctntaaatctcacctcctgtnatatttcctcagaggg

SEQ ID NO: 601 - DNA, 411 bp, HUMAN
  misc_feature (1)..(411): N=any base
cagggtctctnaacagggcaggtcatcatagtacggggantggtcttncaagagccgaagcattttactgtgagcctgagggaccaggctncccatgctcctgtgacactcagggcctccttcgcagacagaactctggcctggatctcccgctgggggcagaagaaactgatctcagcccccttcctcttttacccncagagattctttgaggtgctgctcctgttccaggagggagggctgaagctggcgctcaatgggcaggggctgggggccaccaagcaatgaaccagcaggccctggagcagctgcggngactccggatcagtggaagtatccagctctactgtgtccactcctnaggatggttccagggggaaataccgcccagaaaancaagaaaggtcagcc

SEQ ID NO: 602 - DNA, 352 bp, HUMAN
  misc_feature (1)..(352): N=any base
ggagagctgtctattcagatcctttgcccattttaaaataaggatgtctttntattattgaattataagantcctttatatagtctaaatacaagtcccttgtcagatatgattggcaaatatgtnctcccattctgtgtgttgcctttccactttcttgatggtgtcctttacagtacaaaagtnttaaatttncataaagnctaatttgtntttaattttntaacttgtgcttttggtgtgataatctgaggaagatgtttttaaccctactattgagcaagaatatgggatatcacagttaattcatagtaattgggtataggctcgtgaaatgnattcggnccttgtc

SEQ ID NO: 603 - DNA, 454 bp, HUMAN
  misc_feature (1)..(454): N=any base
agaaacagcttgctaaagccctctccacttgcaagataacaaaactgactgaaattggctggaactaatatgaccaactagagtctgtgcagactgagcttgctgacatcacagcccaaatttccacatttcattccagctactccagaatttgcacatgtggcccataaagaggcatgaagagacaactgtgcacgtccaaggacttttcagacttcctctttccttccccagaatctaccccctaaacctttcctaataaacatactaccttaaggccaatttgcggggagacagatttgagctggactcctgtcttccttgttggttatctaagtaaagctttcctttcttcaaaaacctgggtgccccctaagtttgggaggttttgcttgagcccagggagttttgagatttagcctgnaggcaacatgggcaaanccccacggtgtta

SEQ ID NO: 604 - DNA, 432 bp, HUMAN
  misc_feature (1)..(432): N=any base
attgaggcttttttgtggcctatggtctggtttatgtttaatgtacacttgagtagaatgtgtattgtgctgttgttgagtggggtgttctgtaaatgtctgttaggtttttagtgtctgctgatcaagtttttctaactcctcgttgatcttctgcctcgctctcctgtctgttaggaacctggccctgccaacaccttgattctggacttccagcctcccaaactgagacagttaatttcagtgtgaaaccaccccatttcttctgttacaaccaccctgacacaggctgattgagcttaacctactgtgggaaataagtgggcaacctcagnatagtgctttgaagggagggcgggaacagattgggccattttgtgtgagtgcatgtgtgtcgttgtgtgttgcgtgcgtgcgtgtgtgtgtgtngtg

SEQ ID NO: 605 - DNA, 385 bp, HUMAN
  misc_feature (1)..(385): N=any base
gaacttccaccttctcacttaaaggaagcacttgacggcttctttttggcacatccgaattgccggcatcactactctcgggctttggggtcattaagaagtaaaataagggctccttgaacacaagcactactagactacgacaattattgatacgcagagggctcctgagtggctaacaggcagggagtgcagacagtcagcgaatgtagacagacatcgtgaatagctggacaaaggatgcttctactctcggatggtatgagacancaggagatttcattgctctcctcagaaaggtntgaaatttcgccgggcccagtggcttatgcctgtaatctcagcactttggggagaccgaggtngggcagatcacctgaggtca

SEQ ID NO: 606 - DNA, 405 bp, HUMAN
  misc_feature (1)..(405): N=any base
tctctgaaaggagaggaaatcgcctccaggaaccagttccttaatgacgtagataggccgtctttgtgtgtgaactcctatacttttgacattactgggatgattatattgcttgaggattttggcttctagtaaaaattttaatttcagttcctggggaagacgttcttgacgtgttttaacagcaacagcaattttatcctttaatgtgaccttaaatgtggncancaaaattcccttgcctcttgtaacgtggcacctttatgattgagaacccatttcttattctcctaatgggccatactgtgataccatggatggctctttaattgggaacattggacttttttttttttttggcaattttaaacaattgggggtaaantccatataacatcaanttac

SEQ ID NO: 607 - DNA, 349 bp, HUMAN
  misc_feature (1)..(349): N=any base
actcttgcaaaaaatttagaacaaacctccaaattcatttcagaagtccagcattaccctgataccaaaatcaggcagatactttaagaaacgaaaactacaaaccaatatccctgatgaatgtcgatgcaaaaatcttcagcaaaacactagcatgcttaattcaacaacacattaagagttacaccaattacttttagaatgcaagaagatggttcaatatatgaaaatcaaattaagacatcacattaacaaaataatgggacaaaaaccacatagggccagggggcagtggcttcatgcctgttaatttccagtactttggggagcccgtgggtggggcagnttc

SEQ ID NO: 608 - DNA, 341 bp, HUMAN
tcggctcactacaacctccacctcctgggttcaagtgattctcctgcctcagcttcccgagtagctgggattacaggcgtgtgccaccacgctgcctaattttatattttattagagatgaggtttctccatgttggtcaagctggtctcaaactcctgatctcagctgatccactctccttggcctcccaatgtgctgggaatacacgcgtgagcaccgtgctcagcctaaaatcttttattaccagactagccaggacagccaatatttctgggcttttggaattctaccacaggtaaacctcccatgtggaaattaattacatttttaactaagggtc

SEQ ID NO: 609 - DNA, 367 bp, HUMAN
  misc_feature (1)..(367): N=any base
gagactacatagggctcggcgtggctgagagcagctgtgtcggcagaaaggctcgagggcttgggcatcactggggtggccgctggtggggggtcaggctccccggatgtcagcactcagccggcgncatagtccacttcgctgcgctcccacccctcctcccggtcttcactgaagctcctttcagcgaaggtaggagtgggctggacggccagggaactcagagctgctgtagaccttgctgaaccggtgggagcaggaggagaactgggggatctctgtggacgattcttcatcattggtctcgtcgtcctcggagcccagatggccggtaacgttccgaacgtgtttcaaagtagctggtatc

SEQ ID NO: 610 - DNA, 352 bp, HUMAN
  misc_feature (1)..(352): N=any base
ggactttgcctttttcttcctataaaagggacaacagtgctgtccctgactactgcaaaaccagggagaccaggaggttccttcccctgcccgcttcctggattcagagttaatttccctgaagtctcctggtggtagaggggaaggggctcatttgatgtcagcaggtacgaagggaagggttggagtgctgagaactgccccccacttgctgttctttttattgcagtggagttcacagggcccccacagaagcccccgaggctngngcgcacagtccatccagcccacagctaacctgggaccggattgatgacctgggtgttaccttcaatgttcatgggagctggtt

SEQ ID NO: 611 - DNA, 342 bp, HUMAN
  misc_feature (1)..(342): N=any base
ccaaatgacttaatctagtctcaaaaaaaaaaaanaaaaaaaaaaaaaagaaatgatcattgtcagaaaagacgcttcattaagtagtgccagtgtttttgtttgcggtctgcaattgtcagatggtcggtccctatnttcacagtctcgggaggcttgggagatataggtcancaccctttgtgctgggctgctctctctgtagtcatgcttagctcagttgttttgtggggaagttacttaaacagggaaattaaagtatttctgtgactacttctgctctnactactgcaaaacctttctcnttatagctctggggcttatttgggccaaaattttgac

SEQ ID NO: 612 - DNA, 485 bp, HUMAN
ttttttttttttgggactgttgaccttgctgggagaaaagagacaacgactgagcaagcactaccaccagcactgttactgggaattagaagacctgagtttctgtccagaccctcagtgcaaactgaggatgctccatccaaagtgaattatgtcctgtgcctcctgattgctgagtgttcacctggaccttctgactaccttccctgtgctattccatcagcctacagacctggtacctggatttttgcccgagatgattcctaccaccttactactgacgaagacacccattccagtggaccactgtgacccaggaggcattcagccatcatgatgtggcctttacctccactcctgtcttgttctacccagattcagcacagccctttatagtgaagtcagagtcctcaagccaaatagctaaagctgttttatcacaacaaaggcctagtttgttccatgagtgtgcatttcatttcttc

SEQ ID NO: 613 - DNA, 736 bp, HUMAN
  misc_feature (1)..(736): N=any base
tttccagagtgccttgattcaactgtttactaatcagaaaggtcggtatagtcggtcctttttctactgctggcaagtgatttttgtatattttattacaaataaaacaatattgcttgacagcatcatctgtcatcttacaaatatacaactacacagtcctaaagtaatagtatgtctctagaactgagcttttcttaaaaacaaacaataactatactattattaagtcctgcaccctaaatctatacagcagctttaatcaatgtggaaatgaaattatgatttattaatttacataaaattactttatacattaaagaataatttttcaaattgttaaaaaaacaaagtctgaagctgtcattattgggaatcgtgggacgtggtttgctcttctatcacctgcttcacaatttctgccagttttagtcgatctactttatctgtgaatccacgaccattccagctgaagctctgcagagtatctcttaggagtttgcattcccggttatacttccaagcctcctgcattacttcattcagtttctcatcttcattctctcctttaccagcctgggggagaatacactgagcaatcacatctcggagttnttccaaggcaacatttggaatcctcggctccattctcatggtcgtggatatagacactgtcctttggcttggtgcccagtaacttccttctccgcagaaatggggtgtcacatgatgccag

SEQ ID NO: 614 - DNA, 459 bp, HUMAN
tataacattttaaactacttatttttatttatatcagagtaacaaatacttatgaagtcctttgaagttcagcgcacaaatttctcgtgtggggcggtgggtgtggccatgttcttgctcttccttctttacacatttgagttgtgccttctgttcttaaagagattttcctttgttcaaaggatttattcctaccatttcacaaatccgaaaataattgaggaaacaggttacatcattccaattttgccttgggtttgaagagtctctcatggtggcacagtcctccagggtagctatgttgttgggctcccctacatcccagaagctcagagactttgtcaaaggtgtgccgtccacccattgccactgaccctcgacaacctggtctgacagtccaataaaaaactctctcattttaggtttcttgtaggaaaggaattcctgctcctcctgtga

SEQ ID NO: 615 - DNA, 763 bp, HUMAN
  misc_feature (1)..(763): N=any base
gcggccgctgttcctgggacgtccggttgaccgctcgtctgctgcagagaccatgtctgccgacggggcagaggctgatggcagcacccaggtgacagtggaagaaccggtacagcagcccagtgtggtggaccgtgtggccagcatgcctctgatcagctccacctgcgacatggtgtccgcagcctatgcctccaccaaggagagctacccgcacgtcaagactgtctgcgacgcagcagagaagggagtgaggaccctcacggcggctgctgtcagcggggctcagccgatcctctccaagctggagccccagattgcatcagccagcgaatacgcccacagggggctggacaagttggaggagaacctccccatcctgcagcagcccacggagaaggtcctggcggacaccaaggagcttgtgtcgtctaatgtgtcgggggcccaagagatggtgtctagcgccaaggacacggtggccacccaattgtcggaggcggtggacgcgacccgcggtgctgtgcagagcggcgtggacaagacatagtccgtagtgaccggcggcgtncaatcagtcatgggctcccgcttgggccagatggtgctgagtngggtcgacacggtgctggggaagtctgaggagtgggcggacaaccacctgccccttacggatgccggactggcctcgcatcgcacatccctggatggcctcgacctcgcgtccgtgcagcagcagcagcaggaacagagcctcatcgtn

SEQ ID NO: 616 - DNA, 476 bp, HUMAN
gctctcacccactttctcctgttacggcaggggaccgacctgtttgccgtggctgccatgagtttggccacgccctgggcctgggccactcctcagcccccaactccattatgaggcccttctaccagggtccggtgggcgaccctgacaagtaccgcctgtctcaggatgaccgcgatggcctgcagcaactctatggtagggggagagggacctgccgcgaaaccatctttgccccatccagtgtcctctgcagcagggccaggggacgcacacctgcctgactctttcctcacagggaaggcgccccaaaccccatatgacaagcccacaaggaaacccctggctcctccgccccagcccccggcctcgcccacacacaggtgagtcccccaccaactcggagaccttgggtgaccagctgcccagcctcagtgtcctctgagatggggatggtgggggtccctgccttggag

SEQ ID NO: 617 - DNA, 496 bp, HUMAN
ttttttgtgttaaaatatttattcttaaagttcttaaaggtggacatgttcaaggcttaaaaattaacttcaaaaagtcaagccaattcacaaacacctaaattaggtgaaggagaatctctcccaactttaaaatacacattaaataccttcccctcatgctgcttcattattttttataattatctccagttgggtgtaggctatgtcttcttagaccgacagaaaatttggcttttctcagaatttatgcagaatagcagaggttaagtgttagagtttggaagaggtcagttgttgtataagcagcttctggatcatcttccagcactctggagagaccaaaatcagaaactttgcatactaagttgctattgaccagtatattccgagccgctaggtctcgatgaacataacccatatcagaaagatacttcatgcctgatgcaatgcctcggagcattccgaccaactggatgactgtgaagtggccatc

SEQ ID NO: 618 - DNA, 574 bp, HUMAN
  misc_feature (1)..(574): N=any base
acatacgtactaataaacatggaattctagggtcttaagagtgttcaggggaacaggcttcgctangctaagtgctcatgggcctccttttcacttgcggttctgcatttccttttacttatttttttcccaactctatcgaggtgtgattgacaaatgaaattgtaacaaaggtgtacaaagtgctgaattgatacatgtatgtattgtgacatgattaccacacaagttagtgaacacatctgtcacctcaccttgttgcttgtgtgtgtagtgagagcagttgagacctactgttagcacatttcaggtgtacagtattgttgactctagtcaccttgccgtccattaggagccccagaacttacctagttcaagtagagaggttgggctctgccttttaacgagtcttaaccactaggaggggcatttctggcattttcaggaacagaattggcatattaggccganggcttttcgtgttggcatcntgggggcagcactnctcacccgnactcctgggaacccncaggggccggggtttgcnttcagaggggcaggtgagacccaaaag

SEQ ID NO: 619 - DNA, 491 bp, HUMAN
  misc_feature (1)..(491): N=any base
aacagtgtgcggtttcctcatgggcagatttgtgtaatctcaaccatagtcaacaaacagcccatctgcacaggatccttccagctgctcttccataacttcatctctcccctcaacacctgcaaccactaagccattttccccctacccgtctgtaattttgttattttgagaatgccaggtaaatggaatcagagcggataatctttggagcatgattcccttgcattcacctgtgttgtttcgtgtatccatagtttattctttttttaatctggggctcactggcaatctccgcctcctgggnttcaaggcggattctcctgtctcaggcctccccagaagctggggattacagggggncccgncaccatggcccggctaaattttttttgtatttttagtagaggttgggggtttcaccngttgggccagggtggggtcttggaactcttggacctcaggtggatcccacccgggtggggcttccc

SEQ ID NO: 620 - DNA, 492 bp, HUMAN
  misc_feature (1)..(492): N=any base
gcaaatgagacacatatagatactgagacctgtgtgtacagtaggaccatgcactcacacccatctggagagggagcccccggtataccaagggagccagttgtgttcagacacacacatcacagcttgactcactaactgaggcctttccatagctccacagcttccccttctcccctgtcctcaccatatgccttatccccattctactcccctgctatgcaagtgcccctgtggcttgtccccaaccccctcagcaacaaagctcagctggggaacgagagtaatttgaagaatgcttgaagtcagcgtcttccattccagaaagacccccattcttcctttgggggtatgatgtgggaagctggtttcagcccagggacccaccactgagggagagggttttaggacaggtggggcttatttccaaggggncctttctggggcttggagaagggctttttacacacacacaacacatacacacacaca

SEQ ID NO: 621 - DNA, 408 bp, HUMAN
  misc_feature (1)..(408): N=any base
ttttnaaaacggagctcgctctgtcacccaggctggagtgcagtggcgggatctctagccttcatctttctcccatgctggatgcttcctgccctcgaacatcaagaccccagtgtctttgggttttggaccgttggacctacaccagtgatttgccagggntcctgggaccttcgaccacagactgaaggccgcactctcagcttgcctacttttgaggttttgggccttggactggcttcctgggctcctcagnttgcagacggcctattgtggggantttcaccttgtgatcgtgtgagtcaattatcctagtaaactccccttcatatacacatcagtcctattcgttcttgtccctgtaggatcaccctgactttgaacaggcattgaaggacccaacggttg

SEQ ID NO: 622 - DNA, 408 bp, HUMAN
  misc_feature (1)..(408): N=any base
tgacttgtaggctataggggctataatatatcaagacaatctttatcctcatgaagcttacagttaagtaagagatagagattaaataattataacaacagagtgaagaacagtgaagaaaaagtacagagttataatatatataatagggccaggactgcatgaggaaggtaggaaagacatttcggcaagaggttgtcagggaaaagacttgcttgagaaagagccaagttgtgggggtctggctgcttagcaattgacccttaataccttaactttttgcttattttttacatggaagtaactaattttaaccctattgagggaaagtactactacccttcttaggtttttacaggttaagtaaggccggagttaccggngaaggtttaaaactctttcacacgg

SEQ ID NO: 623 - DNA, 371 bp, HUMAN
  misc_feature (1)..(371): N=any base
gaataatgtcagagaaaataaccagaacattacaaataatactggaagttgtaccagaagaagataagttatgaactaatggncttgagatcttggcaatctgcccaaggggagacacaaaatagggattttnacttcattttctgaaagtctagagaattacaactttggtgataaacaaaaggagtcagttatttttattcatatattttagcatattcgaactaatttctaagaaatttagttatanctctatgtagttatagaaagtgaatatgcagttattctatgagtcgcacaattcttgagtctctgatacctaccnattggggttaggagaaaagactagacanttactatgtggtcatntc

SEQ ID NO: 624 - DNA, 519 bp, HUMAN
  misc_feature (1)..(519): N=any base
aaaagaccaagaaacctacccaagattcttgtgagaatactgaagctcaccaaaagaaagccagtaagaagaaggcccctcctgtgactaaagatccctcatcattaaaggcaaccccagggattaaggattcatcagcagcacttgccacttctacaagtctttctgcaaaaaatgttattaaaaagaagggagaaattatcattttatggacaagaaatgatgaccgggaaattttattggagtgtcagaaaagagggccatcatttaaaacatttgcatatttagccgccaagttggataaaaatccaaatcaggtctcagaaagattccagcagctaatgaagctctttgaaaagtcaaaatgcagataagttgctgaattcctgggactcttaactgatattgcatactacacaggaagccttcaaatttcctcatgtttttaaatgagcactagaggggagggtttatcaccctttttgggttaccagatggataatcccatanttggttaat

SEQ ID NO: 625 - DNA, 447 bp, HUMAN
aaccatggcagcatagaagtctctgactggaccaaatggactggtgataaagcctaaggtccagctctgtgatcttggataaatggttcaacccctcatcacctccgtcccttatctaaaatgcaggttagactcagtgattggtaaaggctctcatagttcctttttctctgactctgtacccagactcagggagcaaaactgtcatttgccttggtaggctttttgatatctcctgaaaaagcagcttcgggaggggatttagcttctgctaattcttcttcacaaagacacgtgaccatttctgaatgtctggctttaaaaagtgtaacaggtggttggactctgcagagacctcgggttagtctggcactgccccttaccacctatatgaccctgggggaattattcacctctctgctcccaagttttgtatattaagggtaa

SEQ ID NO: 626 - DNA, 450 bp, HUMAN
ttttttttttttttttttttaaatagaaaacagctgggcctgggggacactaccaccaaaacacgaagaccggtagtggccccgaatggctgggcgcgctgatatttattgtatacaagacaagggggacaggcagggtaaggaaggtgggtcgtccaagtcgattgataaggtcaagcaagtcacgtgatcataggacaggggtccctttccttttaggtagctgaagcagagatgggaaggcaagcatacgtcagcgttttcttctgtgcatttatcagaaattcgatcaaagactttaagattttcactatttcttctaccgctatcttctaagaacttcaaagaggaaccaggagtacgggaagagcatgaaagtggacaaggagcgtgaccatggaagcacagcaccacagggaggggtttaggcctccggatgactgcgggctt

SEQ ID NO: 627 - DNA, 122 bp, HUMAN
ggccacatggtggtctggccggtggcaacaaggctataaatcagttggtcagcattccttcctgaggtgagacactctgcaaccttggttccatattttggatctcctatggccaattcctg

SEQ ID NO: 628 - DNA, 221 bp, HUMAN
tctcacctcggctgccagtccacagtgaacaccaccacagacacagtgaaaggctacttcctggctggaggggacatggtgtggtggccagtgggtgcatccttgtttgccaccaatgttggaagtggacatttcattggcctggcagggtcaggtgctgctacgggcatttctgcaccagctcatgaacttaatggcttgttttctgtgctgatgttggc

SEQ ID NO: 629 - DNA, 475 bp, HUMAN
agagaatgtatcttgagccaatgtattaatagtagattgctttgcttatgtagtaggcaatatatgggtatacattttcctgactattatcttaatgactattccaaattatgactaccttaaaaactaccaaaatcccctgctccagaattttcagtttcagatgaggttcataattcatggcctcacttttcccacattctcctacaggttggacgtgataagtatgagcctgcagctgtttcagaacaaggtgataaaaagggcaaaaagggcaaaaaagacagggacatggatgaactgaagaaagaagtttctatggtaagtactaggaggaatattgtattccatccttattaaaaatccatgatttttaatcccccaggcctcactgtatcttcaaagaactgctatatattaaaagagatcatagcagctgtacagatctcatctagtcgtagaggttaatgttgaa

SEQ ID NO: 630 - DNA, 592 bp, HUMAN
tttttttcaggttcccacacagtttattgagggagccaaagccagtgagaggacgaaggagtcctacttcaacctacttccttaaagctgtgtgcctccagcatgaagggaccttcccagagggcagggcctgccctataaggggccacatgaagccttgtggagactcctgcctctcataccacagcctgtcctaccctaaagacccagacatgacagcagacataatccccaccccaggagggtgctgaggaaacacccttacccatgcccctcccctagagacctcaggaagaaaggccaggacacctgtcctgtgattggccagttgaatcctcaacgtgaagacctggcaggcctggctgacaggtctgttcagatgtggcctcaggcatctactctaggatccaacccctaacattcaaacatgattaaaaacacccaggacacttctcttgctggcagaggccacaccccagataatggcagtcctgccaaactctggccagagatagggacccaagctgactgggtgtgagcacgtaaggagaccactctgccccatggggagaatcttccagggctcagctga

SEQ ID NO: 631 - DNA, 317 bp, HUMAN
tgatacttctgaactggtgaggtgtgctcacaatgaggtttcctcacaatgaggtttcctctaaaagttatttttttactttcttctgttagcaaagcagttgccgctacagattgaatgcatctgggccatctgcgggttactgggttaaggatttttgataggaaggctacgggttatcagtggcctcagtgctttcagaatacgcccttgtttacactgacaacaaagtggtattggagtcttatagggttatggagaataccttcaattatcaattataggttttaaatttaccctggcttttaaaggaatag

SEQ ID NO: 632 - DNA, 447 bp, HUMAN
  misc_feature (1)..(447): N=any base
gagactggttttttccagccttggtttggaagcttgtctcaaaaaccattacaaaatcttaaccttcaaatacattctaaatcactttaatttagaagataggtgagcaacttgagtgatcccaaaccaaactaacagtgctggtttgtccgacacccaaagcccacttcacacatttataaggacagagatttggtaactcatttgggtattttgtcagttttaacccttaatatacaggtatcccagctttgggcacatgtatgtccattcactttcaggaaggggtgtcagtactttctttctgtgtggtgaaaacataagccatggtgaactgataatttttgtttttaaattatttatattactgaattgggcaaaattacagttcacactggcagagctagggttgtccnatttgggccttaaaacaaaccnggcaacttt

SEQ ID NO: 633 - DNA, 211 bp, HUMAN
  misc_feature (1)..(211): N=any base
aacacacacacacacacacacacacacacgtgcacacacacatccccccacaactacagccgccaaaataaccagcatggngttgtaacattatttctccatcttgcngttttctagccttgagttggggacatgagtgagaactgggggttttgaggagtaacccttgngaacacangtactccaggcagccgggnatcccagatctcct

SEQ ID NO: 634 - DNA, 388 bp, HUMAN
  misc_feature (1)..(388): N=any base
cctaggttggccttgaacctcctggcctcaaatcattcctcctcagcatcttgagtaggtgggattgcagttgtgagccactgtgcctggtcaatttttagttaaacttttagataaggatatacagggtttgcatacacaaaaaatgcaaataattcttttgttttaaatagcttccttttccctaaagagattgctgcaagtaactatgtactgtcttatatcttaagtgagctctacctacttctattcatgactgttagttgatacagagtatgggntttcctaataagccattatatatttaactttataggaaggggaataacttgaaggatccctgaggatacttgggggtccnaatttgtaggaaggtgctgttaaaggg

SEQ ID NO: 635 - DNA, 521 bp, HUMAN
  misc_feature (1)..(521): N=any base
ngacaactgactttctgctttcacctttgcttgtcaactctcccttctcctcattctcttttaatgttaggccccttctccagtcttttccttttactctggtcttttactcgtttttgtatccatttttatttagccccatcacatcattgcttaaccgctgctctcctcccattttcgcttcaccctctttacagcagcctgtccctctcccgatctcagtgatgatgctctaagtggttaagagttgattccggagccaggctgcctgggtttgaacccagatctatttattagcttggtgacccagagcaagttattctgcctgtgactcaattttcctcacctttaaactgggggatcatggttagtttagcattttcatagggattgttgtgaaatttngggtgagtgaatatttggaaacatttcatccagtggnttaggcatatgtagggagagttgggctgtttcacatgattattncagtcccttagttttggtccaganctcattttttg

SEQ ID NO: 636 - DNA, 386 bp, HUMAN
  misc_feature (1)..(386): N=any base
tcataatagccattctaacaggtgtgagttaaagggtctgtagtactcttgcagtgtctttgctgatattctgtgtttgttttcctgttctttatttcatttatttccactctagtctttattattncttcattatttaggagtgttatttaatttccatatatttgtgatttttccnttctttttttggtctgtattgagttctacttttattccattgtggttggaaaacacactttgacntaatcattttaaatttattgaggttcattttatagcctaacatatttgcctgctggagggatgttccattanaaccntaagtatgttacattctgggccagggcacggtggccgcacgtctntaaatcccagtcagtttgggg

SEQ ID NO: 637 - DNA, 317 bp, HUMAN
  misc_feature (1)..(317): N=any base
ttggcacagttgctggtggaggtccnggctctggtnggagtgcctccaattcccttgctttacgcagcttctcacgctttcgctggatggcagcaacccgttcacgtactgcacgggccactggctggttaatcggcttcacagaccaagcccagagccacctggaattggggtnggggatgaggaacacagcttgggaccccctatcaaagatccatcaggacgccttcttgggaactccagtctcgcctcgggttgcaatngaccccaactgctcctgtgccnctgcaggtntctcctgcacctgcgtccanttc

SEQ ID NO: 638 - DNA, 449 bp, HUMAN
  misc_feature (1)..(449): N=any base
ggggagaaggtctcactatgttgcccaggcttgtctcaaactcccgggctcatagcaatcctcccactgtggcgtcccaaagtgctggggttacaggtgtgagccaccacacactgggctctgctctgcctttctgagtttggtttctgcttatggtggggagcttgttcccgttcttcccacaagaacccaggatgtggcacagcttccctgccgtcttccttcactcagttggctacgctncccatcctagctccacttccagaactgccttcaccctaggctgggtccttgttttgtttttagagacagggtctcactgtgttctcccaggctgggagtacagtgggcgtgattttcgggttcantgccaccttccacctnccgagtttcaaggcgatttttcctggccttcaggcctncccgagtaggttagggntttacagggc

SEQ ID NO: 639 - DNA, 506 bp, HUMAN
  misc_feature (1)..(506): N=any base
aaatcgtttctgttcttttaaaattaaattgtaagacagttgtttgtcagattttggattccatggaaaaagttttgtttagaggtaggtaacacatgaactttttaaaatcaccttaaataagtagcttcttgcgtaagacaccaaatagtgttccctcctcatttgggaacatttcttctgggtacttgactttctttcatatgttttttcataataatagttccagtttataaaattacgttctcttttctagtcgccgagatgacatgggaatcattaggatatgttttgatgtattttaataggaaccagcctgccatggcaagggctaaagggtaaaccaggacttcacatttattcaggtttttctctctcttttttaggaataaaaatatatattggggggaggntagggttttaagggtccccttctaggnctgggggtttttnccggggttttaagggntttaacccctattttacntttttaccccttttncggg

SEQ ID NO: 640 - DNA, 370 bp, HUMAN
  misc_feature (1)..(370): N=any base
ttttttttcagctttatctttttttattttcaaaaatatttgtttatttttaaaattgacatttaaaatggtacatatttatcatgtacagtaccatactgtcagaaaaacagacacacagaacaatggaacagaatagagagcccagaaataaatccacatatttacagccaacttatttttgacaaggtgccaagaacacacaaaaggcaaaggacagtctctgtaataaatattgttgggtacaactgggatatctacatgcaggaggaatgatatcagtctcttacctttcancatatacaaaantcaactcaaactgggntttaaaggncctggaaactagggnactactaggagggnaacatag

SEQ ID NO: 641 - DNA, 168 bp, HUMAN
agcctctgaaccctaggtagagctctttaaatgcttagtctagctacagaatttgacagtgaatcttacagtcccacgtgttactttctagttatttttgttattcttgtcttcccaactaaattataagttccttaagggcaaggatcacatattatattttattta

SEQ ID NO: 642 - DNA, 143 bp, HUMAN
acagcatggaaatatttggggtagggtggtcattcactctgcttaccacttttggtactatgtatgtgtacagtgtgtgaagtcaagcacagtcacttgcatacgtagagctactcaacagtcagtggtaaatcatgtggtct

SEQ ID NO: 643 - DNA, 285 bp, HUMAN
gccttcctgagaagatgcaaccaatcctgcttctgctggccttcctcctgctgcccagggcagatgcaggggagatcatcgggggacatgaggccaagccccactcccgcccctacatggcttatcttatgatctgggatcagaagtctctgaagaggtgcggtggcttcctgatacaagacgacttcgtgctgacagctgctcactgttggggaagctccataaatgtcaccttgggggcccacaatatcaaagaacaggagccgacccagcagtttatccctg

SEQ ID NO: 644 - DNA, 132 bp, HUMAN
gttcttgaactcctggcctcaagtgatccgcctacctctggccttccagattgctggaattacaggtgtgagctaccgcctctggccagtaagtggattctaaattgcttattgaaatgcaaaggacctagt

SEQ ID NO: 645 - DNA, 120 bp, HUMAN
  misc_feature (1)..(120): N=any base
ccccacccggccagaacctttaaatttaaaattgtacagtgtacttgcctggccaagaagcgtaggacggangaaggaagtaatgtttttacccgttttacggttaaagagcttggcttt

SEQ ID NO: 646 - DNA, 219 bp, HUMAN
aaagtaaactatgctgtattaactccatattaggcagccagtaaaaataaatacaaccaccaaaagtaactcagaaatatgtttaggaaacaatactaattgaaaaatatagaacttcaggttgtatatctaccatatttccaatctgtaaaatataagtacatttggatcaagattggaaaggaagacaaattagaataactcatcaataacatattt

SEQ ID NO: 647 - DNA, 55 bp, HUMAN
agctgcactgcctacctgcaagaacttcaaggcatctaaacgcaacatccaacag

SEQ ID NO: 648 - DNA, 263 bp, HUMAN
tttagagtacagattttataaacagcttggcagtgcaggtgaaggtctcccacaggtgtattactttggaccatgtgggaaatctaatgccatggcgctggagctccttggccctagcttggaggacttgtttgacctctgtgaccgaacatttactttgaagacggtgttaatgatagccatccagctgctttctcgaatggaatacgtgcactcaaagaacctcatttaccgagatgtcaagccagagaacttcctgattg

SEQ ID NO: 649 - DNA, 238 bp, HUMAN
gcggcggcgttggcggcttgtgcagcaatggccaagatcaaggctcgagatcttcgcgggaagaagaaggaggagctgctgaaacagctggacgacctgaaggtggagctgtcccagctgcgcgtcgccaaagtgacaggcggtgcggcctccaagctctctaagatccgagtcgtccggaaatccattgcccgtgttctcacagttattaaccagactcagaaagaaaacctcagga

SEQ ID NO: 650 - DNA, 231 bp, HUMAN
cggccctaggtcccggcagcggtggtgacggcggtgccggaggttgtccttggcaggttttcctcggcgcttctccatggaggaggcggtgcgaacggcttcagccccgaatgctcgcatctcccactggacggcgacgaaggcggtggccgtgcgagcgcaggactgggcggcctgtgtgggggtgtgagccgcggtgcccaaggctgcaccggcgaggggaagccgcgc

SEQ ID NO: 651 - DNA, 376 bp, HUMAN
  misc_feature (1)..(376): N=any base
cagaactttctgcctgggctgccagcccccacttgcctgatacaagatgtacttgatcatgctcaggtggtcccatggagttaattgcagcattcttgctcctggaagtggggttgagggcccgaggagaagcagaggctgctcggcagagatcccggaacactttatccctctctcttgcccaggttttatgccgctgagataatgtgtggactgcagtttctacacagcaagggcatcatttacaggtgcnggggtgagggcagcgggggctcttnggaggggaggctccagccccatcatatcttctgaaatgctccaagcaggatccccccaactccagttccttctctgctggaaatccaatctttagctg

SEQ ID NO: 652 - DNA, 180 bp, HUMAN
taaagtatattgatgttttttttattacagctagtatatatttaagaatgttagtataggattttgaataaattttgtttttaagagaagttataatttaattagatggggaggaaagtctttgaagaggaacctctactttactttttataaagtgattctcctgctcagtctccccag

SEQ ID NO: 653 - DNA, 239 bp, HUMAN
agccctttggaatagcagtgttccagtgtgtgaacgtgagttgaaagaactatgtagtttggatagctctccttattttcgttttccagcatgtttttccgcatggcatcacctgttgtctagatctttacttaactaaattatggataaaaatacttctttgttggaagaatttcaagaagggtcttgtaggtcttctctgacatgtgtttttgttactaatctgcaaatcacttagt

SEQ ID NO: 654 - DNA, 334 bp, HUMAN
  misc_feature (1)..(334): N=any base
cgggggtggacctggtttgtataagtaccatgggtgccactctagtctccaggactttctctagcctagacctagtaaccactaccaggaactgctggggcncagctctggttctgtggcatagtgataacaaggactaactcgggacttccaaggaaagggcgctgtggtcactgggtggcagcctcaaatctctgagtcccttccccttgaccccttgacagtctgtggtatagctggccccagggcctacttcacagntgtgtgnaaagagcgtcgaangggctgggaatgttgnctgactacactgtctggtccctccctgccctcagtg

SEQ ID NO: 655 - DNA, 262 bp, HUMAN
gaaggcttctcaatggttaaaacagctgagctggaccttcaaagagaagtagcttaccagcagatatagagcattctaagcagaaagaatagcaaggagggaggcatgcaagtgtttggcagggattcaggaaccttgagtcatctctaagggggctagagtatagagcgggggtgtccaagggtcagaatacagtcgtgggtgcttagtttctgtttctggttgggccagtaaagccccttcctcatcccggttttccact

SEQ ID NO: 656 - DNA, 277 bp, HUMAN
  misc_feature (1)..(277): N=any base
ggagccacctttcaatgacctcccgcacataaggtctcagtctacctgtaggaggtcccctgttcctaattagctccangaggccaagggaggagagggcactggccagggagtctggaagccagataccccttccactgtgtttccatagactgggaaggaaggaggatggaggggtcccacccagactgtcccctgagaccctggcatgctctgtaccttgntagcctggccgaagcagcccttgcccagcacctccccgtggatgangtcgacg

SEQ ID NO: 657 - DNA, 361 bp, HUMAN
  misc_feature (1)..(361): N=any base
acgtatcagtatttagtcaaataattgatgagacctcattacagatctttggngctttgtgtgcagttcactctcctctgatattcagtcctgcgtattttaacattcttcttccagcaaactctcacctctgtctcctcaactcagttagatctgtggatgctgtttgggttctctcttttgttctgtaacctggagactacctccagacagtaatctggagcaatcagagggtttgtctccattgttccccttctctcagggatcacagttttgtgctgcctgttgtcccagtgtctgaaagcttttgttttacatatatttttccagtattgtagttggttatggcagaaggacactt

SEQ ID NO: 658 - DNA, 370 bp, HUMAN
atccaggtgaacactcattctggaaactgatcgctttacccaaagttggccttatagccttcgtcatcaactcactcagctcgtgttttggcttcctcgatcctactctgtctctctttgttttggagaagttcaatttaccagctggatatgtgggactagtattcctgggtatggcactgtcctatgccatctcttcaccactatttggtctcctaagtgataaaaggccacctctaaggaaatggcttctggtgtttggcaacttaatcacagccgggtgctacatgctcttaggggcctgtcccaatcttggcatattaaaagtcagctctgggctgctgggtgctgatattagttgtaagtgggc

SEQ ID NO: 659 - DNA, 173 bp, HUMAN
  misc_feature (1)..(173): N=any base
ctgtagaaaaanaggtctatgttgcccaggngagatcccgtctcaacaacaacaacaacagcaacaaaccaacaaaaaacgaaacaaaagantccagataaaacttctagggacacaaattatacttgagataaaaatatgctaggtaggtttattagcagattagacattac

SEQ ID NO: 660 - DNA, 372 bp, HUMAN
  misc_feature (1)..(372): N=any base
agagagaacccaccatggtgctgtctcctgccgacaagaccaacgtcaaggccgcctggggtaaggtcggcgcgcacgtggcgagtatggtgcggaggccctggagaggatgttcctgtccttccccaccaccaagacctacttcccggtcaacttcaagctcctaagccactgcctgctggtgaccctggccgcccacctccccgccgagttcacccctgcggtgcacgcctccctgggacaagttcctgggcttctgtgagcaccgtgctgacctccaaataccgttaagctggagcctcggtggccatgcttcttgccccttgggcttccccccagcccctcctncccttcctgcacccgtgacccccg

SEQ ID NO: 661 - DNA, 382 bp, HUMAN
  misc_feature (1)..(382): N=any base
ttctgcagatggttatccaactttcccggcatcatttattgaatagaatgttctttcctgagcatatatttttgttgacttcatcaaagatcagttggttgtaggtatgtggctctatttctgggttctccattgtgttccattgatctatgtgactatttttatttttatactagtaccttctgttttagtcactatagcttaggtaggtataattggaaggtcagggtaatataatgcctccagcattgttctttttgcttagggattgctttgactatttaaggctcttttttgggntcccatattaatnttatggatttattcccctaattctgtggaaaaatggacattgggggaacncgatagggggntgccctgg

SEQ ID NO: 662 - DNA, 343 bp, HUMAN
  misc_feature (1)..(343): N=any base
atacnaaactatgtcttcaaaagtctgtgtgtattttacatttatagcgcatctcaatttggtttagccacattgcaagtggtcaatactcatttgtggctagtggctaccatattggacagtacagttctacaggaaccactcaaaacacaattcaccctgggntagcaattttgctactagtctgctagtgcttgagtgagctgtttttaaactgctgttagtgaggaccactaaataggtgcatcttacttgactcgtgttttccctctgaggctgtccngaaggcaaagttcaggaatttttatttacaggcatgacttggattgactcaagggtgggg

SEQ ID NO: 663 - DNA, 560 bp, HUMAN
  misc_feature (1)..(560): N=any base
ggagtttcagtctccaactctcagcccaccaatgaaagccactctatcaaagccatcctgaaaaatatctcagtcctggctttctctgtctgcttcatcttcactatcaccattgggatgtttccagccgtgactgttgaggtcaagtccagcatcgcaggcagcagcacctgggaacgttacttcattcctgtgtcctgtttcttgactttcaatatctttgactggttgggccggagcctcacagctgtattcatgtggcctgggaaggacagccgctggctgcccaagcctgggtgctggcccggctggtgtttgtgccactgctgctgctgtgcaacattaaagccccgccgcttacctgactgtggtctttcgagcacgatngcctgggttcatcttcttcatggctgcctttgccttctccaacggctacctcgccagcctttgcatgtncttcggggnccaagaaagtgaagccagctgaggcagagancgcaggagccattcatgggctttcttnctgtntttggggtntggcantgggggnttgttttttt

SEQ ID NO: 664 - DNA, 335 bp, HUMAN
  misc_feature (1)..(335): N=any base
atatgtttgttggctgtttgtacancttcttttgagaattatctattcatgtcctacccacttttggaggagattgtttttttcttgctgatttgagttccttgtagattctggatattagtcctttgtaagatgatgatttgtgaatattgtctcctacactgtgggttgtctgtttactcttctgattatttcttttgttgtgaagaatttttaaaatttaattaggancctatttatttatttttgtntttgttgcattngcttttgggggnctcaggacataaattctttgcccaggacccaatgtccaggaaatgtttttgctaggaatt

SEQ ID NO: 665 - DNA, 423 bp, HUMAN
  misc_feature (1)..(423): N=any base
tctgtagcacttggaattgaatttgtgcacaatctaaaactatagaaggagaaattacagttggccctctgtatctggattctgcatctgtggttggttgaatcgaaaatattgggagggaaaaatggatggttgtgtctatactgaacacaaagtcttttttcttgtcattccctaaacaatacagcttaacgactatttacgtaggcatttacgtcgtattaggtattatgagtaatctaggagatgatttaagtatactgggagggtctgtgtgggattatatggcaaattcaccactttatgttaggaggacttgagcctctgtaggattttcgatatccnaggaacccattccccccacaggtggccaaagggtggacngtggccntagggtgttacngttggaacccgatgtttttg

SEQ ID NO: 666 - DNA, 384 bp, HUMAN
  misc_feature (1)..(384): N=any base
ttgatacagaaatatttctgaaggatttctaatcagaattgtaaaacaatgtgctatcatgaaatcgcagtcttcacctcatggttcatggaacatttggttagtcccataaaatcctatgcaaaacaaagtagttcaagaatttttaggtaggtagtcacatttataaggtattcctcttactctttgggctttttcagtctgatttatttaaattttcatttagttgttttacttttggactaaggtgcaatacagtagnaggataacttcgttacatttatgttgtagggaaactaaggtgctgtctcctcccccttcccttcccacaaaatctgtattccccctattgctgaaatgtaacagacactacaaattttgtat

SEQ ID NO: 667 - DNA, 446 bp, HUMAN
  misc_feature (1)..(446): N=any base
cgcttaacagagcaagtgatgggagccttgttcctgggttctaccatgggagacgctgatcagcaggatnctggctccctttcccaacccactgctcccaaggcctccagggccntgtgtacataaactggtgggttggaagttgctgggtaactctnatttcagacatgcgtgtggggtaccttttctgtgcatgctcagcctgggctctgtgcgtgtgtgtgtttctatgattntagaagggtaccaggcacaggttctgtcctaagggcacttaccatttagtangggagatggaaccaacccaattaactctagcaatagcctccctaacctgggctcctccattngattcagtgaaccttccaatgcatggctcataatttcaaaatacaggctggttagttactccctacctngaaagccttcataaggtgcctctttgc

SEQ ID NO: 668 - DNA, 467 bp, HUMAN
  misc_feature (1)..(467): N=any base
atgctgtcatcaccagtaagataccccagcccggttggctaacccctagctcagccctgtttgtggttaggggagttctagacagaacataattagacccctgctacttcctgaaacctcagctaggactgcagggaggggtgcgaggctagccacgcaggcggggccctgggtcattttaaactctcagagtgaacgtcttgataggaccgacaagacgcatgacatgtacttagaaagcttatcttagagccacactgagattggaacccgcaaaatatgccaggaaacgccaccccagtgaccaccactgnnccgcgcagggccgtggggctgagccacgctctcgttttgtcaggcagctatgcagttgctcttccttgtttttgtttttttttttttttgtttttaatatttatttttttagagacagggcttncctgttgcctggnctggagaacagtggc

SEQ ID NO: 669 - DNA, 430 bp, HUMAN
cgtacatggcacgtggacctgcatagacacgtgtttggtggaggctgtcttatacggattctgcacaactcaagtcccctaatgggaacagacttggggaggtcactcttgaggctttttgtggtattgtggctactgggagacctgaggagggttctggtcactagcagactcatttcattcaccccttggaatctgcccaggacttggacttctgtgtaatagtaacttcacgccccaatgatcctccacgttccttgctgatgctgtgattgctcctccaagttctccacctatgtccatctgagcacttggtatttctactctagtgtcaaaaggtcctgttcccaagtctcctcccaaacatttattccaatttatcatccagatgcccgtcctttgccatccctctctgttccagcaaaggaca

SEQ ID NO: 670 - DNA, 546 bp, HUMAN
  misc_feature (1)..(546): N=any base
ccangtgaagaggtcattattcgagacagccctgttctccctgtcaccctgcagtgtaacctcacctccagctctcacacccttacatacagctactggacaaagaatggggtggaactgagtgccactcgtaagaatgccagcaacatggagtacaggatcaataagccgagagctgaggattcaggcgaataccactgcgtatatcactttgtcagcgctcctaaagcaaacgccaccattgaagtgaaagccgctcctgacatcactggccataaacggagtnngaacaagaatgaagggcaggatcacctatgtattgcaagtcagttggctacccccacccagactggatatggcgcaagaaggagaacgggatgcccatggacattgtcaatacctctggcccgcttcttcatcatcaacaaggaaaattacactgagttgaacattgtgaacctgcagatcacggaagaccctggcgagtatgaatgtaatgccaccaacgccattggntccgcctctgttgtcactgtcctcagggtg

SEQ ID NO: 671 - DNA, 411 bp, HUMAN
  misc_feature (1)..(411): N=any base
actttaaatacttcactgtactctcttcttgcttgcatggtttcttaggggaagttggatataatttttatttttctctatacgtaaggtgtttccccccctccccagcttctttcaggaatgttctttatctttttattttctgtagtttgaaaatngaaatgcctacatgtaggttttgggggcatttatcctgtttggtattctctgagcttcctggatctgtggtttggtgtctgatattaattctgggaatttctcagtcacttgtttcaaatatttcttatattattttgtttcttctctttctggtgttcttattacacatgttacaccttttatttattttagagacagggtctcactcttacccaagccgttctcccacctcagcctcccaaataatcggga

SEQ ID NO: 672 - DNA, 441 bp, HUMAN
gctgaggctggggctcgggctggggccgcgctgcgggagctctggggagccggcggcccggccattgcgcccctccccggcgagcacacctgtgtggggctttcccccccgccccggacccttctgggcttgatagtgttccgggggaggctggagggtgttgggggaggacggagaggtcatgggagtccccgctctgcctcaaccacctgacccaggctcccccggtttctctcctccggcggtcgcccgcgctcggtggatgtggctggcagctgccgccccctccctcgctcgccgcctgctcttcctcggccctccgcctcctcccctcctccttctcgtcttcagcttctagaaggggggggagagggtgagaacgagaatgttaatcccaggcagcctcgctgacttctccccgcctgctccagcccaggggct

SEQ ID NO: 673 - DNA, 293 bp, HUMAN
  misc_feature (1)..(293): N=any base
acttctatcacttccttttgattttttcttatagcttctatctctgcttacgtcacccatcattcttgcgtgttgtatgcttttcgcattagagccctttgcatgttaatcagttattttaaatttatgatctggtaattctaaaatgtctgccataactgagtctggttctgatgcttgttttcttttcagactgtttttttgtcttttagcatgccttgtaattttttgntgatagctagacatgatgtattgcataaataaaccagtaaactaaaaaaaaangcaaatta

SEQ ID NO: 674 - DNA, 262 bp, HUMAN
caggaagacaggtaaattacccaacctcacacgttaagtcagaactgggagccataattttgtatccctggtataaatagacaatctctcgaagaaatgaagagatgaccatagaaaaacatcgagatatctccagctctaaaatcctttgtttcaatgttgtttggcatatgttatctttggaatttagtgtctgagcctctgtctgttactgtagtatttaaaatgcatgtattataatcatataatcataactgttgtt

SEQ ID NO: 675 - DNA, 251 bp, HUMAN
  misc_feature (1)..(251): N=any base
gaaacccactacggcccagatgggcagccagtggtgctggcccccaaccacacggatcattgccactaccaagggcgagtaaggngcttccccgantcctgggtagtcctctgcacctgctctgggatgantggcctgatnaccctcagcaggaatgccagctattatctgnntccctggnnaccccggggctccaaggacttntnaacccangagatctttcggatggngcagctgctcanntggaaagg

SEQ ID NO: 676 - DNA, 187 bp, HUMAN
aaaaaagttaaacacatgacattggaccttatgaaatgtgtttaccctagagctgttgattgtatgataggtccctcctagatagtattcaaggtttaatgcagaaacagagcaagactctgtttcaaaaataaaataaaataaaatagctggccatggtggcttgcacctatagtaccagctgctc

SEQ ID NO: 677 - DNA, 212 bp, HUMAN
ggcagattgatgacatactcagtgtggcctccgtgcgtccagctgtcttgccacccatacttggctcaaaatgagctaattgcccactgccaagcacgtggcctggaggtaactgcttatagccctttgggctcctctgatcgtgcatggcgtgatcctgatgagcctgtcctgctggaggaaccagtagtcctggcattggctgaaaagta

SEQ ID NO: 678 - DNA, 219 bp, HUMAN
tgttctctgactattcttttgtttatcatcttgctctttttatgcgaatagtcattcttttatctctgaagatagaaactggaggacatttgggaagggatatgtcctgtgcattgtttcttttctcttgcctattctgttcgcgtatttaatgttgacacttttctccaatggcttgagatacatggatgtctgctttttattttaagagcaggccac

SEQ ID NO: 679 - DNA, 442 bp, HUMAN
  misc_feature (1)..(442): N=any base
gagacaaggtagtggaagtgtgtccctcccattcactgaccaaggtgaggggactctagtcctttgctgctgaccttcagcctcccttcctcttaaaaagaggtcctagttggggagcgatggctgaagagttaccataaaataccaagtaggnnnnnnnnnnnnnnnnnnnnnnnnnnnnnnnnnnnnnnnnnnnnnnnnnnnnnnnnnnnnnnnnnnnnnnnnnnnnnnnnnnnnnnnnnnnnnnnnnnnnnnnnnnnnnnnnnnnnnnnnnnnnnnnnnnnnnnnnnnnngtagggccatttagtatggtttcatctttattaaaagtcttaagttttagatttttgaagttatcaccaataaaatatccagttgtggtcttgtgttgagtgaaaatgttatttaaatgcagatatttaaaatatactacaatttttgt

SEQ ID NO: 680 - DNA, 395 bp, HUMAN
cgcctggttaaatatttttggcaagagtacttcataggccaccctcaaaatttcagcatcactcgtaccaagtatctatcacaaggcagcatgtgtctacatctccaccccagtgctgttacagtgggacagtttctagtgtattgtcattgcgaccaggcttttaagattcttagcatatctgtaatatccacatgcagatgtagaatccaaatcgtatttacagagaactttgcatggcagcttttatatggtagtgatacattcagtttcttacattctagattattcagggaggttctggagttggacagatttggggttaagcctgatggctagctgtgtgaccttacacacctcgcttcatctgtttcctatgggaatttataatagta

SEQ ID NO: 681 - DNA, 446 bp, HUMAN
gggggctgaggagtttggaaaatcttgctgtcagtagggagccattgagtgttgagttggggtgggggtgttatggttggcacatttgcatagttactgaggacaggttaggaggggcccctttctccctaatgccctacactgttcccaaccattatagtgaagctctttgaggtgattgagactgagaagacgctgtacctggtgatggagtacgcaagtgctggtgagccgcccaccctctccgccctgcccctgtgccacctccccctgccgctgcacctgaccctgaccccgctcggcctctgccctgcaggagaagtgtttgactacctcgtgtcgcatggccgcatgaaggagaaggaagctcgagccaagttccgacaggttggggcagggctgagggtggggctgactgggtgcctgggtccctgggagggcgtctg

SEQ ID NO: 682 - DNA, 281 bp, HUMAN
aaaacaaagaaagaaaaaggatgattacttgaagtggtacaaatgacaaccaggtaccaagaaaacagtgagtttgggcaagtgtaattttttagaactcacagtatatctagaatgggatgaaagggaagaagatataggatagtctcattcatatagaaagttatcctaaaatcatgtaacaaagaggttataaaaaccataaaatcatcacgaaaaatgacagccactagccctgaatgctgatgtagaaaggacattgatgagaataaaccttctgt

SEQ ID NO: 683 - DNA, 265 bp, HUMAN
cagggactgaccgtgagcctgggtgaaagtgagttccccgttggaggcaacagacgaggagaggatggaaggcctggcccccaagaatgagccctgaggttcagggagcggctggagtgagccggccccagatctccgtccagctgcgggtcccagaggcctgggttacactcgcagctcctgggggaggcccttgacgtgcctcagttcccaaacaggaaccctgggaaggaccagagaagtgcctattgcgcagggagaggaa

SEQ ID NO: 684 - DNA, 232 bp, HUMAN
  misc_feature (1)..(232): N=any base
ttgattggatctttgaaaagtagaagtttaatattagttgaaataattcattattgcataactttctattttgatataatttcaggcttatgtnnnnnnnnnnnnnnnnnnnnnnnnnnnnnnnnnnnnnnnnnnnnnnnnnnnnnnnnnnnnnnnnnnngtggaataattaatttttaattaactttgttaggccagtccctgagacgaataggaccttgtccctggatga

SEQ ID NO: 685 - DNA, 251 bp, HUMAN
  misc_feature (1)..(251): N=any base
anaaaaattaggttggngtcctggaacatggacaatggctatttcttccggtaattgaagattattaagaacatgaacaactagtgtttcatgagcaagttccttacctttactgttaaatagttctcgctcagcctaaatttttccaaatgtatgagatactctgaaagcatatttagagtcagtatagatagttcctacctggttctgtaaatattttagggcctaagtgcgaataacttgcaagcttg

SEQ ID NO: 686 - DNA, 268 bp, HUMAN
  misc_feature (1)..(268): N=any base
ggtgttcgtgtgaaagggtattgccctttacacgtgtgcttggttttgcctttcctatngtctaacacgctcaccgtgntttgcatgctagtatgntatacangngntgntgnattatgntgatttgcatgctgtcttacatgcatgctgctgcattgtgttacacacacgagtccatatgttacatgtgttacgtgcttatttttactaggtatttatgtttgcatattatatgtttctgtgtgcatcagcatatcatggcacatgt

SEQ ID NO: 687 - DNA, 328 bp, HUMAN
acggtactgttttctgtgggacatctgttggtttttgagaagcacctgctggcactgacggcagtcttggggaacacaggtgctcctgccagagtcctcaccttctgctcacattgcagaaggccccctgctgaggccggctggccggaggaccaccccgcagaccacgcgcccggggcctggcaccaagagggaggccccgatcagaagggggagcggaaaccttattaagcttgcccatttcgccgtcgctctggtcatcatttaccgcaccctggggcagctcctgcccgagcgctacgaccccgaccgtcgcagcctccggttg

SEQ ID NO: 688 - DNA, 59 bp, HUMAN
acagagcattaagtgcctcttaaacttggtctctctggttctgtgggtctttttggaat

SEQ ID NO: 689 - DNA, 216 bp, HUMAN
  misc_feature (1)..(216): N=any base
gcagcccttcggaaaagtggccagactgttagggtgcctgttcccatatctcctcaccaggcaggtcctccaggcctgggcctccaggaatcncctgccagagcaattgagtctgtagctctgctactccctggtcagatcccccaggggcaaatgaaagcctctctgccactgtctctacagtggaatgcccttgctacccttggataacnaagg

SEQ ID NO: 690 - DNA, 293 bp, HUMAN
gaaggagggggggaacgaaacaaaggaaaaaaatctaggtctgcacacaaagaactgctgggtgaacggctgtgggcatttcatggaaatattgcccgctttccccctttgaatgcttacctggcaggagtcgactttgccttccaggaagcctgcgcagatcatgcggtctgtgagggagaagttgtagagcacactacaggttttctggtctatgatgcccacggacgccttctgcaggagctcgggcttggtggctaccagggaaagagccagaaaggccacgtgcacag

SEQ ID NO: 691 - DNA, 270 bp, HUMAN
aaaaacccccaaaaccaaaaccccacaaaatcagaggctcaagatgactgatgtgaagggagtggcgtttaagaggccatttattttgatgacgcagctgcccaggaacagagaacatgggagaaggcatagactgacaattaggaggaggagaacactttggaaggagactcttattttggtggggcagctgctcaggaacaaaggttcctggtaggggggcgcaacctgcgggatgggatggagggtattctgaccaatgtccctggc

SEQ ID NO: 692 - DNA, 260 bp, HUMAN
gttaaaatgaaatccagcgcctttattttggaaattccatcttgatttgatatttgggatatataaaaaatgtggttgtaatacatctgatgaaatttaaacatcaaacatactgaagaccaaaatgaagttggaaaggcattagctaaaacaattggcatgtaaataaggatcttagtagtgaattttttccttggctttcttcttgatagagttcatttagaaaactgagtgaactaagaaattgtttttgtttgttg

SEQ ID NO: 693 - DNA, 211 bp, HUMAN
gctggccagccacgagtgaccctgctgcccacgcccaacgtcagcgggctgagccaggagtttgaaagccactggccagagatcgcagagaggtccccgtgtgtggctggcgtcatccctgtcatctactacagtgtcctgctgggcttggggctgcctgtcaacctcctgaccgcagtggccctggcgcgccttgccaccaggaccagga

SEQ ID NO: 694 - DNA, 271 bp, HUMAN
caggaggaagagagaagccggtagtggctcagttctagtccaaaaggctcagaagtagggaagttgacagtgcagccttcagcctgtggccagaggcctaggagcccaaggcaggccaccagtgcaagtcactgagtccaaaggctgaagaacctggaatctgacgtccaaaggcaggaggaaccacaggagaaagacggaaaccagaagactcagcaggccagcacatccctccttcttctgcctgttttgttctagccgcactggcagc

SEQ ID NO: 695 - DNA, 354 bp, HUMAN
  misc_feature (1)..(354): N=any base
caaaaaaacaaaaacaaaaacaaaacaaaaaaaaaacctcagatttcagggcctcaagcctacagtttttaggtcaaggtgggatnnnnnnnnnnnnnnnnnnnnnnnnnnnnnnnnnnnnnnnnnnnnnnnnnnnnnnnnnnnnnnnnnnnnactcttggggacccctccctttacaaaaatgggatggacatttgagccaagccagactaattgtccttatctggtattgtgtcatactggaattaggaaaagcagcccttggcttcaactggccatataccataaggacatgagacctaaagtgccatgtactcctgccatgcagagaagccagatcaaaagaatctaaca

SEQ ID NO: 696 - DNA, 250 bp, HUMAN
aattttttgatagagacagagtctcactatgtagcacaggctggcctcaaactcctgtgctccagttattctcccacctcaacattaagtacatttttattaaactattcctaaattagagctccagttgggttggcagaagggtccaatattttgacagagaaatcttaaagttattttgatagatgtatgaggagaggctttaagagtgtctatacttctcatgaattggaaagaaatactttctctg

SEQ ID NO: 697 - DNA, 223 bp, HUMAN
  misc_feature (1)..(223): N=any base
gaaagagtagtctcatgttttcctcaagaaccaagatgaatagcaatanaattgcttccaaaatgggttccttctcccaatcagattctgtagctcttcaccaaagggaacatgttgaactgcttagagccaggagattagccaagtcactggccattctcttaggggtttttgctgtttgctgggctccatattctctgttcacaattgtcctttcatttta

SEQ ID NO: 698 - DNA, 229 bp, HUMAN
cctccctcccctccatccctccattcccctccatcccttcatcccctccatcccctccatccctctatgcccctccatcccctccatccctctatgcccctccatcccctccatccctccatgcccctcaccaccacctgagggtctcccaccccctctaccactctgtgtctcctctcccaccctcttccctggagggcttacagccggctgtgcttccaggagccct

SEQ ID NO: 699 - DNA, 181 bp, HUMAN
  misc_feature (1)..(181): N=any base
gtcagaaggaccatgaagagagagaagagggcagagccgtgcatggggctgctccccaggacctgagcaggaacctggagttttcaggtgagaggctcacctgtgagcaggatacctgcctgctcgcctattggnctccannttgactagctacctagctaacatctttcctagtacctgt

SEQ ID NO: 700 - DNA, 250 bp, HUMAN
tgacaacttgacttctctggggactctgaacttccctggtcgaacagttttttctaatggctattcaaggtaagatcagtgtttttctgtttcttaagaatggtacatttaaggtagattaatagatgtaaatcttcattgatttatatgtgttctctaaagattcatgtgcttttttatatgaataagtttaagtggccttttgaaagtaggaaaggtagacaacctaagtgacatctgtacgtaacca

SEQ ID NO: 701 - DNA, 262 bp, HUMAN
aaaggttagtaggaaatgtgttttcccccatggggcattcctggagaaatctctagcaataaaggtacttgtttgactggacaagttgtaaaacagtttaataaggttttttttaggtgtcatagcattaggcaaagctaactgaattgactggattgtcatagtcaaacatattgcagatccgcttccaatagaagacaatgaaatagtcactggaaagcctgtgctcctaattttagaacctcatgtatcttctgctcct

SEQ ID NO: 702 - DNA, 175 bp, HUMAN
gtatattttatatattatactggaacagctcgtgcccttggtctcttgcctcagcacctgggtggcttgccgcccacaaactgctcactgttcaattaccattttcagaatgctttttatgtttgtttgatgaattcataaagtctctaatgtgaaataagccaagcacagaaag

SEQ ID NO: 703 - DNA, 206 bp, HUMAN
ttgcataatgaaaatccaaagtaaaactacaatgagaaactattttatacctattaaatattttaaaatttaatgctaacaagattaggtaaagttaatattcacatgaaattagtagagctgcttttgaaagcagaatggtagttcatgtcaagagctatggtaaaaattgacatttcattatcctaagggagtgattaagaaga

SEQ ID NO: 704 - DNA, 78 bp, HUMAN
tttgaggcaggactggcactggggtgggggcatggtttggggttaccttaaggaccctggatatttctcagataggac

SEQ ID NO: 705 - DNA, 222 bp, HUMAN
cgctgggagtcggctgcccgggctgcgcggggaacctggagggcaggagcaggcgggagttgttgcttcggggcgcagggtccagaccttgccgagaccggcgttgggagctagcagaaccgggaagaggctcgattgtgtccggtggggccgccgggagcctcggcgacctttgtctcctgcctggctcctgcactggagtgtgacccggggcgctgcagc

SEQ ID NO: 706 - DNA, 206 bp, HUMAN
agtgcaggagtgagtaggtcttttactgacactactctcagtgaggctcagcattcaatgtctatagatgcttaagcagtagtaagaaaggtataagaaagcagccagaaatcataatgagagctctttcataccatttatagcgtcctcatgtcactcctaatgttataatttctctggttatattagagaatcttaaagattgg

SEQ ID NO: 707 - DNA, 243 bp, HUMAN
aatacaaagacaacatggggccagaactccagaaaggatgctgactttaagaggactcagccacccatctcagagagcacttcagaggatccagtaagggtcagaaaagacagtgtaagctgatatttatctaatttaagagatgcaagctcaaatgccttcctggggcatacaagaatatgtataaaagaaaaactgcaaatgtgatgataaaaggcaactgacttccaccctcagtttgag

SEQ ID NO: 708 - DNA, 163 bp, HUMAN
tatgaaagacatctgttgtgttttgtatgtgcacatattgagagacatccataaactgaatagttgtaatattcagccattctaaaatttatttttaaccacgttactgaggtatgattgacatacaaaaagctgtacatatgtaatgtgtaaacttgatgtg

SEQ ID NO: 709 - DNA, 246 bp, HUMAN
ggtattttaaaaaactgtgcacgttggggtactagaaacgtaatgggctttggagtacagcacacctgggttggaattctggttctaccactttctgtgcagccttggcccaggtagttaatctttcagtgcaagcagtgttgtcattcataaacatggaggtgatgcggatcatgccagatatgctatggacattaactgatctgtgatattaaagcatagtcactggtacttggggttacctaa

SEQ ID NO: 710 - DNA, 149 bp, HUMAN
tgggtgtgggtttagaggtccccaggcggcctccccctgaacgtcccagcgcccccagagcaggtgtgcgagcactgatgggatttcctgcatttctgtgttaagggaaacagatggccaagcctcggggggcagtgattctgggactg

SEQ ID NO: 711 - DNA, 570 bp, HUMAN
gctctgtgaattcccaaaacagcttgaaggggcaccgtgccctggttggggtggggtgaggggcccagtgactcttatggggccctcaggccattcccttcatgggaaatggcagccaagagcatcaccaagaatgactggttcacgtccttgctcccagaactttccggggctctctggctgaccacaggccaagttccagacccctctgggtggggatgctgagtcagggagtgaggggaccagatctgggttttggaagggatgggagggagggaggtggaaagcagggaggcctgggagagacgctgagcagtggctgagggtgtggtgcaggacagcaccttttcccagaggattctttcggcgggggttggttgcggggtggtgctgcccagtttctctcaaagtctgccatcggtcaccagccctgggagctggcaggggctggggagaaggaagagggaggatgttgcccagaatcgcccccacatggccaagcagttgcctgtcacctcctcttttctccctcttcagatcctggtgaagaccatgatacgtaaacgctcc

SEQ ID NO: 712 - DNA, 275 bp, HUMAN
cagcaaccctggtgaagaaggttgaatttggaactgacacacttaacatttacttggatgagctcattaagaacactcagacttacaccttcaccatcagccaaagtgtgctggtcaccaacttgaaaccagcaaccatcaaggtctatgactactacctaccagatgaacaggcaacaattcagtattctgatccctgtgaatgaggataggagctggaaactcagttagtcctctgtgacattactggagggtggaacattcttctgtcgctt

SEQ ID NO: 713 - DNA, 242 bp, HUMAN
  misc_feature (1)..(242): N=any base
ccctgggctgctctgcacccggacacttgctctgtccccgccatgtacaacgggtcgtgctgccgcatcgagggggacaccatctcccaggtgatgccgccgctgctcattgtggcctttgtgctgggcgcactaggcaatggggtcgccctgtgtggtttctgcttccacatgacgtcctggctgcccagcactgtntaccttttcaatttggccgtggctgatttcctccttatgatctg

SEQ ID NO: 714 - DNA, 297 bp, HUMAN
gggctacttcacctccctttctatgtctgcttcaggaaggaaagaaaggagaaataaggcttagggctagaatcaggaaataaaggctttcccagaaacctccacacttgtgcttaggttgtattagacagaactgtgtcacatagacactgctacttgtaagagacactgggaaaccatgtctagcacttacagcctcgaatgttcctgctgtcctacattcaaagacattactctgtacatattaaccttcactattcagatgaactacaactggaactggatctaggatatagg

SEQ ID NO: 715 - DNA, 265 bp, HUMAN
gcgagtctccggtttccgcccagtctctggggacgcggtggcggggtctgaatcgcctggcttccagggagttttgggcgggtccccgcacgggagcgtggcaggcgctggactcgacagcagatgtggaactggagagcttggcgcgccctcatactttgtcacacacctacgccaccagactggggtcgggcccctccgcgttctgctctggagggcctgggtctgggcccagcatagcgcttttagaatctcctcagctgaa

SEQ ID NO: 716 - DNA, 167 bp, HUMAN
ctgcctttattatttttgtcgcgttattcaaaatcagataactgtatgcctattattattaagatagggtcttgctatgttgcctaggctggccttgagcttgtgggctcaagggatccctctcatcttagttttactaattactaagggcacagacccttgccact

SEQ ID NO: 717 - DNA, 214 bp, HUMAN
cgcagcgcagactatagtttcttaaggaagattttcttaaatggggattcaccgacccaggcatctagtccattcttccagtgtgggaagtatttattttccttgaaaggaagtctgtacataaatggattctgagaaagctgtgctagatctgccgctgcttttttggttttgggtttttttgagcctgggtgacagagcgagactccatctc

SEQ ID NO: 718 - DNA, 253 bp, HUMAN
  misc_feature (1)..(253): N=any base
ctggggcaggcaccaggctgtcttcagatacttcatacagaaatggtatctccctgacccttttctgcgatttgcctcatctgtcttcatctcatcaagggtcaggacgtaggagccgacagacccagcacctttctgagtctgtcctgtccaagtgagggtgactgggggcttgttcttcttctcagagcctccctgtggngttctcttccctccttcagcctgtccatcaacacagcattgcgggatcctt

SEQ ID NO: 719 - DNA, 140 bp, HUMAN
taagaacgcggggagatggattttcatgccaatcgttccccagcgacccagactcagaccctggggcatcgggtgtgtgcatagagggggcagtatatgggaagggctcaatcaggtggctccacggcccaggaaagagg

SEQ ID NO: 720 - DNA, 60 bp, HUMAN
attcagcactttattgtaaaataggccttgtgttagaattcaagctgtctaaaccacctt

SEQ ID NO: 721 - DNA, 182 bp, HUMAN
aagattttcaagacgaactgtgatttggggagggatggccatctcagtcaactttaactgataggaggtacaacaaatttatagttctgaactctgcacctggagtctgtctaccgaaatcaaaccacttgctgaccagcataaaaataaataggaaaatatttcagtgttttccacacaac

SEQ ID NO: 722 - DNA, 112 bp, HUMAN
gagctgcagggtctggcatcagctctgtgtcttttccatggccccaggctggctcaggtgtgagctgaagaggcaaaactgtctgtttaggttgcattgggttcccctgaaa

SEQ ID NO: 723 - DNA, 169 bp, HUMAN
  misc_feature (1)..(169): N=any base
tgcatgcatacgcaaggcagtttgatcccagtgcttttctttttagcaactatannnnnnnnnnnnnnnnnnnnnnnnnnnnnnnnnnnnnnnnnnnnnnnnnnnnnnnnnnnnnnnntcagatcttagaatctttgcatttaaaaatgcaaactgattgagcatctga

SEQ ID NO: 724 - DNA, 238 bp, HUMAN
ctctgagcccatggggaatcttcttatctcagcattgcagaattcagaatccacggtaacttttcatgtcattttgactgcttgtcatgcatgcacttcttttttagatttctctcatgaaaagtgttgacaaatattccttttggaaagagctcacttttccattacactggttctaagtatcaggaatatatcagaggacatttttatccacttgtgggatgcatccacatggcta

SEQ ID NO: 725 - DNA, 290 bp, HUMAN
cataacagcattgtggatgatgagaggatgaagtccactgagtacatcagcacaaaggaattcaccagcatcaggatggtcttggtggccattttcactagagaagtccttaatataaggctgctgctgtgaaagtgctgggagtgcctctgatgcctggacaaaagaatgaccatgtatacacttgagagcagcgtgattcctatgaagaaggcatctctggataatgagagcataagaaatagcgtcctgatgaggacattcattgggaaaaatgtgcaatatttgct

SEQ ID NO: 726 - DNA, 146 bp, HUMAN
aaattggcttgatgtaattctgttccatagaaagaattttagataagacttttttaaagctgagcccaactatgggtttgtaacctcaaatacatatgagttgggtaaatttctttcctcttgaggtccaaaataacttggggctc

SEQ ID NO: 727 - DNA, 147 bp, HUMAN
gaaaatcaccttcccgaggagcaggcgtggtgcagacccacaggggtttgtggcgggagtagagggtctgtttggggcgagataagagactgaacggcagagtagggagtgctggctaaggcagtgctgcagagcgaaactctagac

SEQ ID NO: 728 - DNA, 153 bp, HUMAN
tttaataggtgggatgtggtgctagtccaacatgtgtgggaaatggaacaactttaaaatattctatttggggtttcagatattggtatttacaagacatgtccatattctaatgtagatatcaaaacagtcgatacaggccaacatcaaaat

SEQ ID NO: 729 - DNA, 283 bp, HUMAN
acattgacagctttgaagagtgcagcctccagtcagatggctctgaggtgctcctgagtcctgaagtcacctgtggtcctccagacatgatcgtcaccactccctttgcattgaccatcccgcactgtgcagatgtcagttctgagcattggaatatccatttaaagaagaggacacagcagggcaaatgggaggaagtgatgtcagtggaagatgaatctacatcctgttactgccttttggacccctttgcgtgtcatgtgctcctggacagctttgggac

SEQ ID NO: 730 - DNA, 201 bp, HUMAN
tgggagagagagtatctaggaggtacctgcgctttctccccaccacggtaagtaacgtgccatcattctcccatttcacagagggcagactgaggctctgaacgcggaagttcttgcaagatatcacgcagcagagcagggatgtgcaccagatctcctgactttaaaaagcaccaaacatagtgattaagaacaaggact

SEQ ID NO: 731 - DNA, 337 bp, HUMAN
aaatgaaaactgaaagaggctcaggtcaccgacttagatcccaccatcagtcagatgcgtatgtggtgccaacgctgctggatgctccaaccctcttgtcctccgagctttgggcttcttcggcccactgccctgtggctcccatcacctcctgctgtgccgtggagctgggcttccctcgcccggggccgtgtccagctatccagcccacactcagcgctgtatgcggatgctgctgccttcagtggtcccaactgcctgccaaccgtcccaggtggagccttgctgctggcggctcttgtggttgggtgctctcgaaggttactgattcggaaag

SEQ ID NO: 732 - DNA, 180 bp, HUMAN
gggtaacagagcaagactccgtctcaaaataaaataaaataaacattgtatatacttttttaccagtaaatggtgaaaatatagatgaattgggtggttttctaggaaaatgtaaattaccaaagtgacttaaggtgggacaggaaacctgaataaaatggaaaagtagggaagaaactt

SEQ ID NO: 733 - DNA, 199 bp, HUMAN
ggggaaacggaggcatgggcagaggaactgagctgtacctggaagtggaagacgcctgcgtagccatgctggaaatcctgtccaggagggaccacccggcgcaggagccggggatacagagtaagggaggcggcggcggcaaggaaccagcagttacctgggaggagaggccaggattaggtgaggatggaaggaggga

SEQ ID NO: 734 - DNA, 70 bp, HUMAN
atcctcattgctactgccctctgcgctcctgcatctgcctgcccatattcctcggacaccacaccctgct

SEQ ID NO: 735 - DNA, 412 bp, HUMAN
gccaccacgcccagcctcctatccctacttcttacaggttatcacataaggaatctgagccacttcttattttgaaattatttcatctgtcttaatgtcagtttagtatctgtaacaataacttatttcattttctttccaatgaaatatatctttatctccataatacttagtgttccataatgatatgtggaattgaagggctctctacaacacaatctcctcatgcccacacctaccttcaacatttatcttaagctaagccactaagagctttctcaagttgtgcttcctaaagctgcagttctcaaaatccaccccacatacctatgaagcccatataggaagccccattttagaaataatttttgtaatcgaataaatattagaaacacttcacacctcctcttgg

SEQ ID NO: 736 - DNA, 390 bp, HUMAN
ctccccattgctcctagctcctgaggctcaggacccctggcttctgtcctccctgctcagggtcctgcagcgttgcctctgctcagccatgctcctgctgctcgtcccagtgctcgaggtgatttttactctgggaggaaccagagcccagtcggtgacccagcttgacagccacgtctctgtctctgaaggaaccccggtgctgctgaggtgcaactactcatcttcttattcaccatctctcttctggtatgtgcaacaccccaacaaaggactccagcttctcctgaagtacacatcagcggccaccctggttaaaggcatcaacggttttgaggctgaatttaagaagagtgaacctccttccacctgacgaaaccctcagcccat

SEQ ID NO: 737 - DNA, 192 bp, HUMAN
gaattttctttttttgttttggtgaacatatatgttcttatttctgatattatattgttcataggaatgtagtcatatttgctactaaaaaacgttcatatggtttgataccacatttcagcatttcacaatgatctgcaacttccaaatgctctgcactagaacaagtctgaaaatcactcaactggcctt

SEQ ID NO: 738 - DNA, 160 bp, HUMAN
acaagattctgatataatgaacctaaatcaaaattcacaaatggtggctgaaatcctgtgagagtacaacataaatccatagttattgtgcataaacaattcaaaattagtttataaagggaacgtcaacaagtcctataaccaccaccttattactaat

SEQ ID NO: 739 - DNA, 306 bp, HUMAN
ccctaatttccctaaccagtgctggcccaggtaacagaatattgggttgtgacatactatgttttgtctgacttgctggaataaaattacttgagagcattgaaaccacacaatcagttttcacctaatatcagcagcgctcattttccccgtcttcctttggaccccagagccacagagacaaccaacaacaagcagatggcccagtgccctgcctcagaagatttatgtattcctaaggaatagccagcttaatggagattcacagagagggtttctttctattcttattattcagataattca

SEQ ID NO: 740 - DNA, 371 bp, HUMAN
cttgagaggaaatgcaaaagtttgaatccaggactacttcctaatcaatgctcaatgccagtcgatcggtccacccttggcaagtgtaggtgtgcctttccaggtagctcattgaaaggggcacttctttgtagcaggcccgtggacttgattggcatgtgtgtgacactttgtggcactcatgggtttgtgctagactttattaggttccatagtcctgtaggctctgaactctaaaagaatgtgtgagttacagaaaagattccacactggtcataaaagaaccaaatgctaaagatgcaaagatagtaaaataggtatatgagtccattatatataggaaggtgattccaagaatgaaactaccacat

SEQ ID NO: 741 - DNA, 285 bp, HUMAN
ttattggtttaagttctaagcaattgctgctcttactgatggcatccgcagcctgtctggtgcagtcactgcagggatgccagcttcaacaggggaagtgcagcccggactgtgcactccatatagctagcaggggccaggaacaggagggagtcccaccttctactgaattaaaggggcaggagccccatgcttcccaacacaaatgcagctgcccagatgtggctctggacccaggcatccctgtgctctcaggaagcccctccatgccctcacaggctccaa

SEQ ID NO: 742 - DNA, 536 bp, HUMAN
ggacgggctcctggtggctgtgctgctgctgtgagcgggcccctgctcctccatgcccccagctctccggctgggtgggcttggccatggtcagcgtgaacgcgcccctcggggctccagtggagagttcttacggtaagtggggctgggggaagactggacagggcgggactgcggtcagctttgggaggccatgggacacctccccgtgtgtttcttacgggcccaaagctcctcctggagctcctctggaagggcaggaagccccacggaggcaatgtgaccgcttccctaagctctcaagccggggcatggcctgcttggtgcgagaagtgctgggaggggccgagaagccctggggcagaggcttggctcattttgtctgtccagaggccttcctgggaatgcatctcaggggtctttccaaaaccccacagagggtggggcttggaagcaccgtcctgtttcgatgcggggcaaattgaggtccaccaggagaggcttgctgggcctaggtcacgttgctggtgcattat

SEQ ID NO: 743 - DNA, 253 bp, HUMAN
  misc_feature (1)..(253): N=any base
aggngggcnancaannnnccagggagnagnnctgnnncntctctcaggagaggttcctgggaagaagcttgtcgctttggatcagtgtaatttcttccnccgttcagggccactcatacagtaatcggaagtacgagtctgacgaagacagcctgggcagctctggacgggtaatgcgccctgaggcacncttgtctctgcctcttcctgtctcctccaggctctgttgctgtttctcctgtctcatatctct

SEQ ID NO: 744 - DNA, 392 bp, HUMAN
agccagtggccagcatgagccggagggagggaagtctggaagacccccagactgattcctcagtctcacttcttccccacttggaggcccagatcccgtcagacacacagccttgcgcacctcctcaccaaatacgctgagcagctgctccaggaatatgtgagtgggaatgggggtgggggtgccgggggcctggggaatgggagcagacatcacagaggtcctcgtatcacccattctctcaacctcattttccaactgtggaaatcaggggctcctgtagtaggtgacagcaagttgcccctggtcacacagcaaattggcaggaggaccctgtctgtgacccagatgccactctgtcctctccagcttagaggcaccctcctcagtgg

SEQ ID NO: 745 - DNA, 562 bp, HUMAN
  misc_feature (1)..(562): N=any base
ctttgcaaacataaatctgttggtgctcaggctagctggtagagccccatcaaaaattggatgcctttgaaaagtttgcttagagcaggggttctaaatttggtgcgcacaaatctccatggataaaatnnnnnnnnnnnnnnnnnnnnnnnnnnnnnnnnnnnnnnnnnnnnnnnnnnnnnnnnnnnnnnnnnnnnnnnnnnnnnnnnnnnnnnnnnnnnnnnnnnnnnnnnnnnnnnnnnnnnnnnnnnnnnnnnnnnnnnnnnnnnnnnnnnnnnnnnnnnnnnnnnnnnnnnnnnnnnnnnnnnnnnnnnnnnnnnnnnnnnnnnnnnnnnnnnnnnnnnnnnnnnnnnnnnnnnnnnnnnnnnnnnnnnnnnnnnnnnnnnnnnnntgttgatattttaataactgtcttttgatatcattggtttgccttgtaatcttatgtatatagatttattaagttttccttttcttgcgtgtgagttgtcccccattccaaagtattccatctacttttctaatcgcgtcccctttgcaggcctctctggggatggactgg

SEQ ID NO: 746 - DNA, 576 bp, HUMAN
  misc_feature (1)..(576): N=any base
caagtatcactgtatttccctagaaaacctgaaatatcgatgaattttctgtggcactctaggggtcccttggtgcacactatgggaaccatgggattaggaccattaggatttgattatggcttcttcctgcctcagatctaatctttacctggcatttttgccttaaagatgaaagaagcatacattttgatgtatttnnnnnnnnnnnnnnnnnnnnnnnnnnnnnnnnnnnnnnnnnnnnnnnnnnnnnnnnnnnnnnnnnnnnnnnnnnnnnnnnnnnnnnnnnnnnnnnnnnnnnnnnnnnnnnnnnnnnnnnnnnnnnnnnnnnnnnnnnnnnnnnnnnnnnnnnnnnnnnnnnnnnnnnnnnnnnnnnnnnnnnnnnnnnnnnnnnnnnnnnnnnnnnnnnnnnnnnnnnnnnnnnnnnnnnnnnnnnnnnnnnnnnnnnnnnnnnnnnnnnnnnnnnnnnnnnnnnnnnnnnnnnnnnnnnnnnnnnnnnnnnnnnnnnnnnnnggccctttttcatttggggcttattctttggagagaaacccggataaaagcctatcctttaat

SEQ ID NO: 747 - DNA, 519 bp, HUMAN
tgaaaacaataacagcataactgagcaaatcactgatgtggtgaagcaaccagcctttatagctggtattggtggtgcctgctgggtaattctgatgggttttagcatatggttgtattggcgaagaaagaagaggaagggactcagtaattatgctgttacgtttcaaagaggagatggaggactaatgagcaatggaagccgtccaggtcttctcaatgctggtgatcccagctatccatggcttgctgattcttggccagccacgagcttgccagtaaataatagcaacagtggcccaaatgagattggaaattttggccgtggagatgtgctgccaccagttccaggccaaggggataaaacagcaacgatgctctcagatggagccatttatagtagcattgacttcactaccaaaaccagttacaacagttccagccaaataacacaggctaacccatatgccacgacacagatcttgcattccaacagcatacatgaattggctgtcgatct

SEQ ID NO: 748 - DNA, 347 bp, HUMAN
gagagttataaaaggtttacaagaatctcacctcatgatcaaactgggtaagatttgatagaattatctctaaggtttcattaaaaaagttggggttgacattaatagtagactaacgcaagggtgaaatttggctttctcctcttgcacaggattttcatgtaacattaaagacagattgtttggaagctaagtcctccctcttaatgagtgaaggtttttgccttgttttaaaatgttttggtcatgactttggctaaaataaatagtttatagtaatccgtaattgtacttcataatatcaagtgctttgaaccgctaacatatttaacaggctcccccaaatc

SEQ ID NO: 749 - DNA, 797 bp, HUMAN
  misc_feature (1)..(797): N=any base
ggatttccgggttgcagtgacctatggtttcaccactgctactgcgcctgggcaacaaatgagaccctgtctcaacaaaacaaagcaaaacaaaacaagggcaactatgccatatgacatcatcaaatcacaggagtgataactcatcaaattcacaggtcctgttctgtgctgcctaaccaatacttgttattggcagggttttaggggtctgtatactttttgtgttattatttaagaaatcattttcggccaggcgcagtggctcacgcctgtaatcccagcactttgggaggccgaggtggacggatcacaaggtcaggagatcgagaccatcctggctaacacggtgaaaccccgtctctactaaaatacaaaaattagctgggtgtggtggcgggcacctgtagtcccagctactcaggaggctgaggcaggagaatggcgtgaacccaggaggcggacttgnncagtgagcaagatcgcaccactgcactctagcgcgggngacagagtgagantccgtctcaaaaaaataaaaagaagaaatgatttctcagccttganggtctaaaatatttaactttcagcctgggccaacatggggagaactcatctctcccccgccccccccccaaaaaaaaaaggcttgggtgcggtgggcccaccctgttaatcccagacacttggggaaggacgaggtggggcggatcacctgagtttcaggagtttgtagaccaagcctggccaaaatgggtgagaacccgncctctattaaaacataacaaaatttagcc

SEQ ID NO: 750 - DNA, 412 bp, HUMAN
tcatcgtcagagtctttttattaagataaatccagtaaaatttgtgtattcacatataatcaaaactgcccttctgaaataaacatttgtatttattttaaaaatgggaatacaatttcatttttcccaagctaataataaagttatatttgggaaagataagtttaactcttaacattacatgaaaatagttcaccttctttataaaagcaacctgcagaacaagaatgttggatgaaactctttttttgggatccctcactttatgaaattatcacatgtataaaagagtaaaattaaaattcaaagatttgacatataacttacacaacacgagattcactcacaaagttgaaagcatatttttttctatgtattccactactataatcacaagatttatagataaatg

SEQ ID NO: 751 - DNA, 381 bp, HUMAN
gtcgaccgggatcaggagattgagaccatctctgactaacacgatctgcccgccttggctcccaaagtgctaggattacaggcacaagctaccgcgcccggccctagcaaggccatttttacactttctgcagaaagggtacactccccagcagatttgccatgagagtacaccgaacaaaggagacaggttcatttataacctgacgcatccaccctactgctgtgtccagtttccactggctggaatggaacctcacattttgtacttgttttgattggcttagaactttttaaaaggcgtaaaggcagaggagaagaaaggaaggaggaagtaacttgtggaatgctgagaaaggcaaaaacatcttcaaatgtcgac

SEQ ID NO: 752 - DNA, 330 bp, HUMAN
gaggacaaattattcaactgtttatcatacataagaccgcatgactataatacaaaggggggttcttttttcatttaacgttacaatatacacagcaagtccggactagatcttacaatctgaacacaggtatttaaccttttccatgctgtttatgtttacaatgcacagaaaaaaaattgacctagtcagccacatggaattgaccaatagaatgaaacgcggtgttctgctgagtcatcttaaacaggttatcggcagaggtagattactgcttcttttctaggcttcttttgatcctggacaggtaaattacttatcttcattctc

SEQ ID NO: 753 - DNA, 896 bp, HUMAN
gacgaagcaaggaaggtgctgtgtaatcattaaggagcggaggcttttggagctgctaaaatgccggattacctcggtgccgatcagcggaagaccaaagaggatgagaaggacgacaagcccatccgagctctggatgagggggatattgccttgttgaaaacttatggtcagagcacttactctaggcagatcaagcaagttgaagatgacattcagcaacttctcaagaaaattaatgagctcactggtattaaagaatctgacactggcctggccccaccagcactctgggatttggctgcagataagcagacactccagagtgaacagcctttacaggttgccaggtgtacaaagataatcaatgctgattcggaggacccaaaatacattatcaacgtaaagcagtttgccaagtatgtggtggaccttagtgatcaggtggcacctactgacattgaagaagggatgagagtgggcgtggatagaaataaatatcaaattcacattccattgcctgctaagattgacccaacagttaccatgatgcaggtggaagagaaaactgatgtcacatacagtgatgttggtggctgtaaggaacagattgagtaactgcgagaagtagttgaaaccccattactcatccagagaggttttgtgaacttggcattggagctcccaagggcgtgctgctctttggtacagccggtacaggcaggaaactctgtggcgcgggcggttgctaatcggacgatggctgcttcattcgaagtatgggattctgagcttgtaccgaaatacgtccggtgaggggggccgaattggttctgaatcctcttgaatggccaaaacaaaaaaggcccgcctaatttccttggtcgaaattgtgc

SEQ ID NO: 754 - DNA, 404 bp, HUMAN
ttttttttttttttttttttttttgttgtagggatcctaatgtcttttatcatataaatattacacaaagaaaacttacattaggtatcaaaaaactttacaatctgtacatttgtttttttcttgcatttctatattatacattttgagacagaaattcacaacggtcagtaaaaaggtaagtcagcaaagaaaatgagaagtgaccctgctgttaatacaacaagatttgtccttgttttggcagataaatacctggccaaactaaagtcgtgtgagatgcagaaatttacactaggcttgataagccaaagccttttttttttttttccagatttctgtgatcccactagccccatgttgctcaacacaaatactattaacttgtatactatacctctttg

SEQ ID NO: 755 - DNA, 464 bp, HUMAN
tttgtgaattgagaggtctgctactttattttgataatgcagggatattatttatctttgcagaatcaggtgactcccaacgttcccggaatcttctagtggtctgtgtcaggggtctgggctggctggggttcagtgatgtctactggaggcagcttccatgccttctggggtcctgagtctccatggcttgtggggtctgggtcccccctggattagtggatggccagagtggcatagacactgggctcagctggagaggccccttcctgggatggaggaggctcagttgccttctgtctgagggtaaagctgtgcagccgggcgtaggtcacatcctggggggcttcagatgcagcagcctcagtgtccatctgtctgtcctcttctgcctgtctgtcctttgtgtccaggaattccccagacagtggggagggaggagaggccatttctctcctaggtct

SEQ ID NO: 756 - DNA, 487 bp, HUMAN
tttttttttatattattgtaaatgaaactgttttctggatttctttttcagatacttcactattactatatagaaatgcagttgattatttttaccttgcaagtttactgaatttatcagttctaataggttttttttggtagcatctttaggattttctatatataagatcatgtcgtctgcaaacagggaaatttgactttctcctttttaatttggatgccttttatttctttctcttgtctaattgctctggctaggactatgttgtccttcaacattacgttacatagaagtggtaaaaagtgggcatccctgtctttttcctgatcttagagggaaagctttcagcttttccccattcagtatgacgttagctgtggatttgtcatatatggcctttttttgtgctgaggtatattccttttatatataattcattgagagtttttatcatgaaggaatgttgagttttgtcaaatgaatt

SEQ ID NO: 757 - DNA, 467 bp, HUMAN
agatggagtcttgctctgttgcccaggctggagctcagtggcacaatcttagctcacttcaatcttcatcttttgggttcaagtgattctcttgcctcagtctcccgagtagatgggattacagttgtgcgccgccatgcttggctaattttggtatttgtaatagagacagggtttcgccatgttggccaggctgatcttgaactctcgacctcaggtgatccaccacctcggcttctcaaagtgctgggattacaggcgtgagcatgatgcctggctggaaagtcacttcttatctttgagcctaaagacaaattttcttgtgtgtaaaaccggatcataatatctgcatcctgggtggctagtgggaataaaatgagatcaggcaaggatctgcttccgggcaggtgctcaggaaatgacagctgttatgattaatgagcatagcagaggacagagggtcacgt

SEQ ID NO: 758 - DNA, 513 bp, HUMAN
taacaaaaacaactctgtattctcgtccccaccattaccatctctcctttgtgatgtcaaagagaccagaggaagtggacagactcggggaagaataggtaagtattagagacagaaaaagtatgaagtcccttctgtgaggactaacaatagtgatgccattttacaaccttgatgactgtgttctcaagaaacaaagcaaatgtcaaccccgtccatagcttcaacagagcataacagctctaaccgcaacagagcctaacggccctaaccacatctgtccccagttggaaagtgtccaaacagttccaactagccagcacttccccaacccctccccaacagaaactttattataaaagcctcagcttgtaagcgatcaggatctcagccagattcctaactggaactcttcgcaggcttttcctgtaaataaacctgtttggccgtggaattgcctcctgttactcgctctctacgtttatatcttcctaacaccttccggctctaatg

SEQ ID NO: 759 - DNA, 378 bp, HUMAN
ttttttttggtattttcagttagattctttcttcttagaggtacagagaaagggaggaaaatagctacagacatggtgtaagtaggtcacagcagtttcaatgcaccaaaaaatgtgacatctccatccagtgatatttgtgcattttctcttggtattgcaagttggagttcatctccttcttccagttttgcaatgccagctgaatagcaggaattattgggtagtgtttcaggcatattttgaatacatcgaaacaaagtcaccagactcaattcatccccaaagacatggaccttcttcctctgaattagatgtcccatggcgtaggtcttatcagtatataaaacctgaccatatataaaaaagtaaccagtt

SEQ ID NO: 760 - DNA, 349 bp, HUMAN
aacattattaatcattagcttttaatattactctttgttgcattactaatataacctaggaataaccagtgggtatagggtcaggtgctgaagggacattgtgagaagtgacctagaaggcaagaggtgagccttctgtcacgcctgcataagggccgcttgagggctccttggtcaagcggtaacccagtgtctgggaaggcaccggttacttagcagactgcgagagggagtctcctttccttggaggagtcagggaaaactctgctccagcagcttcttgtgggaggctggatatttatcaggcctgcgcgcagtcaatccggaggcctaaaaccccttccctgtg

SEQ ID NO: 761 - DNA, 437 bp, HUMAN
ggtgggtgagcagcatgggctttgaggagctgctggagcaggtgggcggctttgggcccttccaactgcggaatgtggcactgctggccctgccccgagtgctgctaccactgcacttcctcctgcccatcttcctggctgccgtgcctgcccaccgatgtgccctgccgggtgcccctgccaacttcagccatcaggatgtgtggctggaggcccatcttccccgggagcctgatggcacgctcagctcctgcctccgctttgcctatccccaggctctccccaacaccacgttgggggaagaaaggcagagccgtggggagctggaggatgaacctgccacagtgccctgctctcagggctgggagtacgaccactcagaattctcctctaccattgcaactgagtcccaggtcggtatttacataatccatctg

SEQ ID NO: 762 - DNA, 507 bp, HUMAN
ttatttgggacaagaaactaaatgccttttcagtggttcatttgaatctaccatacttcaaaaattataaatctaccatcaccaaagaagtacagcgccatttgtattagttgcaaaattaggctatttacttttctgtatgtacttttgtgaggtttaaaacgttaggcttattacttctccttggtatgagagaaaaagcacaggcactggaaagaaaaaggaataggtgtgaaatcttgattttgtgaattaggatgaatgtgaccttatgtaaattacaaagttcctgaatctgtttgcgcagatgaaaatggaaatatactaactgcacctaccaaacacggctgactgaggattaaataaaacaatacatgtaaaggtagtgcctggtgcacagtagaaactccaggccgggcgcgatggctcacggctgtgtgttatcttctacgccagtttttctgattctcagtttatagatgggaaaggagacgcttccagcagcag

SEQ ID NO: 763 - DNA, 681 bp, HUMAN
  misc_feature (1)..(681): N=any base
ttttttttctgagtgacaatccactttaataatccagcttcagctcagctgagaacttcccctctcaggtgcaaagggatggcagagaagtctttccaagagggctcaatccactaagagattatggcttagagaagggaacagctcaaagaagcccttgaagagggtgagggtctggaggactcctgtggtgcaggccatctcccggatagagtgcatggccagttgggggctgcctaaatccagcacccgcagccccagccgagaagccaagataggtccaatggtggttccacagggggtgtcattccggaccatgagatcctgcagggggaccttgactttgttggccacctctcggatcagggcctctgacaccgcgtttgaagcatagcgttgcttgctgttcaccttgatcacggngcccttgtggaataaaggccggtggttctcctcatgcttgtccaggtagttgggatgcacagcatgggccatgtctgcgctgatcatgaaggacttgngtatggcttcctcgaaggctgtcgggtgctggcacgaggctgagatccgccgcagcaccagctctgtcagcagtgactgtgctccctgtgcactctcagaccccacctcttcgttgtcatagagtgtgaccatgcgcacgtgaggctctgtggccaggga

SEQ ID NO: 764 - DNA, 599 bp, HUMAN
gcttgtaattgctctatttattaatacatatatcacaaatgttcacaatatcaatgcattcttgttggcatgctagacagaggcattacttttgaagatcttttaaaaatattttgacttgttcccccttcacactcatttttaaattgtttggatgaggtcctcaatgtctataatgtcaatgcaagaaaaaatacagagagaagtagtaaaataacacaatagcaattaattggggaaaaacaaaatatcatggccttcacaagaagcaacaacacagctttgtaacagggttatacaggtttcaaccgagaggcaaagatgcactaaactgcctacacatacccaggtatgtaacaagcaaggaggccacctcaagttcagttttccttcttgcatgacacatgctttttttctcctcatggacaattattgaagtgtttcgttacatgtcttaggcagcctgaagaaggtaggaaagccttagtagagggaaaatcaaaccaaatgagattaagtcaaaagaacagataactatcgtctgcttatctacttaaaggtgtgtggcatttaccacagtgaggagctaacaggagcct

SEQ ID NO: 765 - DNA, 330 bp, HUMAN
gcggccgcccctgcatggggaaaggggccacaggaaggccctgcgagtgcagctggggccaacaggaacagcaggacaccctccagaggtggccccagcctcctctgcccagcccttcctgaactctccatcatccctgtctccagtcactcagtcagcatggctgtgatggacactggaccacagggctgaaaagatccagagaacacacagaggaataggccaccttacacaccgatggggcccctcctctgggaagggagcactttgtgcacagaagtttgagggggaggagctgcgtgtggtggctcatgcctgtaaacccagcac

SEQ ID NO: 766 - DNA, 496 bp, HUMAN
tttttcaccttttatcacaaagtttttattgaacaaaaataatatgacagtaaaaatgatacataaagtgaagatttgcagtcatagaaaagatgtgtacaaagagaccaacattcaggttatatagttctataaaacttttcccatagcagtttaacactgattaagcagacataaaagggaaaagaaagtcattaatgttctttgaaacctattttctgagtaaaatacctctgctaacacacacatgcacacacacacagaatgaggcagagctatatgactcagggatgaggtcaggacccgtgtggctcagaaaattctgcgttagctgccgcccacatgccttccgcttgtcatccggggtcacttcatactcggccaccccatccaggaaggcgacgcagcggctcagctccggcctcgtggcacagaactctcggaacagcaggcgcccaatgggctgccgctcgcacaggctgtgatagtcacgctc

SEQ ID NO: 767 - DNA, 456 bp, HUMAN
ttaagatttcacaaaaaaagtgataaattttctggggcctacagaagggtaaaggtagaagtaacacaagatgaatcaaggataaaaggactccagtggtccaggaagtcaccgcgagggtgatgcagactctccaggtcatgatggccaaatatcggagggggtggcagatggccacgtacagatcataggacatcaccaccaggaggagacattctgtgacagcaaaagtggaaaacagaaaggtctgcatcatgcggcccgcaaaggagatgggcttggctggatgcaggaggttcaccagcatccggggcaccgtgttgcaggcgtaggcgatgtcgacgaccgccaggtgtgagaggaagaagtacatgggggcgtgcagtctggagtccagtgagatgagccccagtatggtcccgttccccagcagggtgaagacgtagaacagggaga

SEQ ID NO: 768 - DNA, 616 bp, HUMAN
tttcttttcttttcttttcggtctctccctttctttatgggcttttcctaaacactttcttcttttcttatgacctggatctcagtttcactatgcacttccctaacctatttctcctaatttcagttaaggtaaaaagtccacaggtatcagaactggaacctgaagttaggttaaaatgcggtgacaaaagaagcagacttcattatgttcttaagagttcaggctcttaagatttattacccctttcttttgtcctctcctggagaatagaatgagccaagatcagtccttacttgagcaaatcactccagcatcctcagcatgatcacagttatgctttccccatccttgatgtttgcagttccagagagctgactcattttcggtggcatataaaatcatcaacccagattggtccagagccttctccaaaattagatgaaccagagaaactgacagcacttccacattcaagttgtctacaaatgacagatgcatgatctatgttgaagttatcatcacacactgttccccaccgtccttggaatttgatctctattcttccagaacacatattccctccacgcgtcagcctcatttccaaattggatcc

SEQ ID NO: 769 - DNA, 455 bp, HUMAN
  misc_feature (1)..(455): N=any base
atcagcaataacaaagtcttgaggaattttgtccttttatccatataattttagccttcatcgtttggcatacaggtagtgacctgcatatcctggcagtttttgaaatgatagtgactgttctaggcctccgctgatggcatagtcaaacaccagatttccttggagatgattcggaaatgcctgctggaagattaatgaagactccattctgtgtttcataacagtagcgttgttttctccatcaaaaacagagggtcacagaaatgtgctgaaaagatgtggtccagcaaggttctgtagtcccacctcagtgcctgtgggctgtgtttttcactgtaacaagcactttggtaaatcactccatggctntcctcatcctcctctcttttttcttcttggtgggaagctggatngcgggcatgcatcaatctgtaatctcagctactcgggag

SEQ ID NO: 770 - DNA, 517 bp, HUMAN
  misc_feature (1)..(517): N=any base
gagaggatttctttatttcgcgttcagacccaacacactcggacaccttggggccctgtgagggctaagcagggtggtggcgtcagctcccggggaggccccactccctggggaggaaatacacggcaggaggccgcacccagcccccccacggagggacccgtgttgctctaacagggacactgaagttgcctctgccgccccgtgaggggcctgtggcggccccagacccagcccagccaggccagaggagcctcccaggggccctcaggtggtgaggtgggggcttcccggccccggtgcccaccggcccttctagctgcctgtgctgggccaggtgtcctctgaggccggcaggagtctggcccccgctgcacctgcgcttggtggctggcaggggcggngtagggaggtcaccctcgaggccggggtccccatgtgctaggggaagacctgccttcccagccagtgtccacagggcagcaattccacgctctgaggctcagggaccaaggca

SEQ ID NO: 771 - DNA, 451 bp, HUMAN
ctggaagtaatgtctgtttattgatagaaaacaggccacgtccagagaggcccagggccaaaacctccttctggaaggccgaagtcccacagtgccggggagcgcaggagtcagctcggctccgtcttgccagggctggggggaccctcatcctcacccgcttccggagctgcagtggatgtgggggcccctgcagcctccagaaccagttccagggccccctcgcccgccacacggtgcacctgctcgcctctggccgtcaggatctcttcgatatttctcttcccattcaggtccgagaaccagcccaggttgtcagcgatgatatggtggttctggcagccggggcaggtcacaatgaccacgccttggtgataggccagcttggagatgcgcttggaggacctagtcccgcagaccttgcaggtgtagacgagctggtagtgcgccg

SEQ ID NO: 772 - DNA, 460 bp, HUMAN
tttgagatggggtctcgctctgtagcccaggcgcgacctcggctcactgcaagctctgcctcccgggctcatgccattctcctgcatcagcctcccgagtagctgggattacaggcgcccgccaccacgcctggctaattttttgtatttttagtagagatgggttttcaccgtgttagccaggatggtctcaatctcctgacctcatgatccacccacctcggcctctcaaagtgctaggattaaaggcgtgagccactgcgcccagccacaaaagatctgcttttaacaaaaatttgtaatgggttataaaaagtttatgtgaatcttaccttatggtcaagcattaaaattgggtagatatgtctataaggctttcttaagaattgggtgtcacataaatagtacactaattccaaggtaaaatttggcttatatggtataaaagtcatacaggaag

SEQ ID NO: 773 - DNA, 393 bp, HUMAN
tcgcgtttctcattgtcttgagattctgggaggaagcctctggggcttcacagaggggctccctaggggtaagtgcaggaccctttgcagagctaccaggaaagagggctgatcacacctcaggcagccgggttacaatccgcataaaaatctgagtctggggagcgtgcgacagaggcaggcagattgtttaaggcgttcgataaagtcggttgatgacagacacagatgtgtgttcccagccgcatttgtgctctggtgtgtgacaggtctgtccttgcctgctttcagctcccagggcccctttgagtctgggcagcccagtcagtccccgtccatttttggccttagcttttccttccctggctacatctgggcccagaacaagtctcc

SEQ ID NO: 774 - DNA, 450 bp, HUMAN
aattttagaaacaaatatatatttttgatagaaactgtaagtaaatattcagtactaccagaaatatactatcttcaactctcggcttttttccaaaagatacagaatcattttttggaaaagatacaagatgtacagacaaatcacattcataccttacaatttaaattcataatgaacaatgaatattttcatattttccagaagtttgaaatttcaaagttgttagcaaaattattcatttccataatttttacgagtaaaaatagaaagagctgatcatgtaccttaatattgtcactttatatattactcaaaagtacaaataaccctaaaagtagaatcccaggcttatcatattataaaaatactgagacatttatcaaacataactaatataaatgaaactacatttttaaaaatgtttcacaaacaccagtccatctttct

SEQ ID NO: 775 - DNA, 543 bp, HUMAN
ttacattttctcagcaaggcaattttacttctatacaagagtgcgtctcatggatggtgcaatggcgagagcacaccggaacaagggaggggaatgggttcttatccctgatgcaggtaccccctactgctgtgttgttcccctatgggctagggttggaccgcacaatctaagctaattctgactggctattttaaagagagcaggggtataagccagagtggtggggtgagaagtttagacaggaaagatggttacggaccaggtgactaaaggtgactcaggtcagagcaggtgacagaggctaggaggggattgtttactgaaactaggggcaaggagacataaagaatgaggaaattaaaagttaaaatgaagaacaaagaacaggtgagctgaacatactgatacattggttctttggagaggatctcagaactcaatgtacttaacaaattacaggctaaaacctttgaagaagaatttatgatatcctacattatcatggggtaaacaattcgtccctgacagaataaggctact

SEQ ID NO: 776 - DNA, 472 bp, HUMAN
  misc_feature (1)..(472): N=any base
cggtggtgacgctcagggtgaccgcagtgaagaggtaaatgactcggagctgtccccccagggccctcccgaagcccgttttatcccagtggattccgccgaccacgtatccaaagcctcctccgagacctgccaggagggcgtggatgttcaggcctcggtcctggtctgcggggctgcacacgtccatcatgtaggcgtggctggggttgtccgccgagtcggcgctaaagtccatcagcaccacaccgcacacggtcagcagcaggccccacttgtggttcccggtcacgtcagccagggcgatgccaatgtcccggccattcagcaagagcgagaggcccagcagtgcccctatagccaggacaagaatgaaagggcgtctccttccaaaccttgaggtacaccggtcactccaagcacccaacagaggctgcagtaggaatccgaggatngggctgatgaaccacac

SEQ ID NO: 777 - DNA, 592 bp, HUMAN
cttcttttactggcttccggccgtctcccaactcgaaccgctcccgcggcggccgaggcgggctgcgactccagtggctggctttcactttgtcgctgtagtcctctctcatcgttcggtgatgtgcagacacttccctgcgggcctcccgctccttgcgccgctcctccgcccgccgctcgcgctccttctgctcccgctgctccttctgctgctcccgcatcttgcgctcccgctcccgcttcctttctaactgctccaagcggtccctttctctcctggaatgctcccttgccatctcccttctcttctgtctttcccattcccggcgagctttatcctgttcttctcgatgccgtttccgacgttcgtgctctctttctttttctttcactctagcatgcttccccccttctgctgaatggctacgatgcctacgtttctcttttctcttttcatcttttctgtgatgagctttttctttccgagacatttgcctggggtgtttgatggccaaagaatcatcttcttctcctctgtcttccatagagtcttctcttctatacggggagttccttattggatctcccat

SEQ ID NO: 778 - DNA, 649 bp, HUMAN
  misc_feature (1)..(649): N=any base
acttgattataggcagccttgataacatctccagcagctgtggcctgggagatagtataaatcccaaagagtccagaatctgagtaactggcattaaatgcagaaacatcaaatggctgctgagttgccttggcaacagcctggtgcagatggctggtggtgttgctgcccctcttgacatgtggcccagcaccgaggacatgctgaagaacactaaattcatttgcctctgcacttcccgcgacagcactttctgctacaaaagcagcatggacaagactgtctccattctgttctcggatttcacctccacggtagttggcctttgcaccagataaaccaagcccacccctcatgttgagaaactgttcagcaacttgctttagaacaggatgactcacaccaagtccaatcaaagccattcttgcacttgtgaaatggttctgaacgaagtaatgtaactcctctgatgtcacttttccaatcctatagtcaggacaatacaagggattagccaaggcattccggtaagctgctgcatgcaaattttcaatgacatgagtctgcggattctgaaaggccacagctntgtcaatctttagctgaggctgaagtcagctacttcccacgacgaaattctggtgctgtg

SEQ ID NO: 779 - DNA, 348 bp, HUMAN
ttttttttttttttttttttttggagaaggaagggctttattcagctgggagcatcagcaggctactgccttaaaatccgagctccccgaatgcacaatttccgtcccttttaagggctcacaatactaaagatttcacatgaaagggtcatgattgatttgagcaagcaggcggtatgtgacaggggctgcatgcaccggtggtcagagagaaacagaacagggcagggagtttcacaatgttcttctatacaatgtctggaatctatgaataacatcagtttctaagttatgagttgatttttaactactgggtttaggccaggcaggcccaggccggacgcgtgg

SEQ ID NO: 780 - DNA, 575 bp, HUMAN
acattttgaaaatttaatggcaattacacacaaattttaatttaaaataatattaaggacttaatctgatttacagaaatgaaatgcaatgaagagattaagggctaacctccattactataaaattctctggctaccatctagcacaggagcaactggattgctttcagcagtcttgaagcactaaaatatcttaaaattcatatggagaaatagtatgtatctctacattaaatttagatttgatatttattctctgacagatcagacccagaatattaatttttatgtaattgaaccaaaaacatttagcaatccttcatttagtaatcttttgtataaatataaaaatctctgataagtgaaatgttttttcaaattatacttctatttttcacagctttataggtaattataattttcaaactttaaatatttcatgtgatttgatatatctgtacagaaagagttagataaaaacatttaataagattaaatctaatttgcaaaaattggtatctgacatttgttgtgtgctcttgcaaagagtgcataggacatttctgcagcaatca

SEQ ID NO: 781 - DNA, 499 bp, HUMAN
  misc_feature (1)..(499): N=any base
gacaaagaaatttattacccctgaggcacaaaacaattaaacataattataattattcctaataatgtatactatgttacattagaattataggagtttcacataattttggaacatgtactgataacactttaatcaaaagcagattaatactttaataaaactatgttgtgctttaattccagtgtttatgaataaactgaataaaagtcctttaattttgggtaattttcacacatagaatttcttttataggattaatttttcacaaaccttccacaacttgctcaaaccttcagctttatcctatctaacataaaacaatcctttaaccctccaaactaggcaaaacttacattcccataccttcttacaatcttttaacaaaagcacattctactttncctgcgtaccttacatgtaagactgcttttccagtagtctcaagaacatgttacatggctaactgttcacaacttttacttttgcgaaaaacctg

SEQ ID NO: 782 - DNA, 550 bp, HUMAN
  misc_feature (1)..(550): N=any base
tttttaaaattaaactgtattgtttcctggaatgtaaatttagctttgcttaatagtaaaataagtgagccatcttgaacactttaagtttatactatataatttcttaatgaacattggcaaatagagtagctaagagattgacaagcacattacgtttagataagcatgtgatgcagaagttgattcaagcaagtgaatccctgacattttgaggatctcacattagacaccaacaaattaaagctccaaaattatttattttttatgtgttcctcactttagaaacgtctactgcatattactggatatttgtatactaatacacttacctattttacattgtgttttaaatttagttaaaacttaaccgtagaagtctgttcaaacgcgaaaggtcttgctttgtttgttttaaatacatttattttattagaaaggatgatatttcattgnggaatagtttctttcatttgggggctatgtgtttcaataacattcacttggaatcagctganagctgtaatatgtctttgaaatgagccatgat

SEQ ID NO: 783 - DNA, 385 bp, HUMAN
caaactgtaagtccggtctctatatatctttacttcaacctgattggtcctgggccaaggttccgggccaagctaagtcacactttctccaaaatagcccacaaactaagcacattccttccccttcccagtccataaaaaccccaaacccctgcctcatagggggaattccatttgggtccccctctctgctggcaaaaagctttcttcttttgcttattaaaccttcactctaacctcacatttctgtctgcactcattaatcttcttaaaaataaaacaaaaaactccaggtgttatctcaaacaacagaaaaactgttacatcttggtgcattactaaaattacatttctaaccaatgtcttttttttttgagacagtctc

SEQ ID NO: 784 - DNA, 455 bp, HUMAN
atacggagtctggctttgccacccaggctggagtgcagtggcacgatctctgctgacggcaagctccgcctcctgggttcaggcccttctcctgcctcagcctcccgagtagctgggacaggcgcccactagcacgcccggctaattttttgtatttttagtatagacggggtttcaccgtgttagccaggatggtcttgatctcctgacctcgtgatccgcccgccttagcctcccaaagtgctgggattacaggtgtgagccaccgcacctggccaaagttatttaatactatacaaattgctgtttaaattttcggatatctctttaaacttttatttttcaagttttcttggtgaaattagagaatatggtctctaaaattttggcattatggacaaagcgaccatttaagaactttcacttttctttattggctttctgcatttccagag

SEQ ID NO: 785 - DNA, 725 bp, HUMAN
  misc_feature (1)..(725): N=any base
ttactggtgaatcttttatttggacaagacaaaaacatctccacactgttcccttttatacagaaaatggaacatctcaaatatattagtttttctctttttcaacagaattcatttcaatctggtcccaggaactgcttctcattttaggattcacgttttagtaacacatatgcacccattacagccaaaagagcatacttgaattttggatagtcattcattattatggtgaccataccaacatatggtaaaaaccctcttgctcttcccaccacgtccttcttttccagccagttctggccttctttgtacaagcctctatcatcaacttcattattatctcctttagtcagaaatttgatgtctccattatctttttcatgaactttgattactctgtgaactattggaatgtctcgtccttcaactttaaaaacaactatttcaccagctctgattgggtcttcccggaaatttgtgaggaacaggaggtctcctctgtgaaaggccggctccatactgccactcagcaccaccacgatggggctctcactgcctgtgagcacgatcaagcctttccatatcatgagtgcagaagacacgatcatggcgaagtttaaaacctggtaatagagctggcgcttgttcatcttcttcangtccnctgaagatatcccagtccccgacgcggngagatgagcctccacggcgcccgcacgcac

SEQ ID NO: 786 - DNA, 547 bp, HUMAN
ttttgattgatttaacataaatactatggtttatttctagatggcaaggaaaatcacgtgtaagaggtttccatttaaaagaattccactattcatcaaaattttcatctattctcaagactgttgatttcaaactaggtttagagtagcaaagcatatgaattttacagtagaagacatgagaaggatataaaagtttgttttctgtattctttcaaaattcttattttgaaggccttctgggcatataagctattggaacttgtcatcacttaaactatttcctataaagatgaaaatcaggctaataaaaagtatttttagaaattaggctgaaaacctctaagtttggtaaaagacataaaactgcaaatttatgaattggagcaaattccaaagggaataaaacaaggaaactcatccccaacataatgaaatggctaaaaactaaagataaagaaaaataccttgaaatctgacagaaaaatgacacactacatacagggaaacaacaatttgaatgactgcagatttctcatcaggaaat

SEQ ID NO: 787 - DNA, 490 bp, HUMAN
tttttttgaatagtttaatagttattatttaagtaaggctttggcgtgcttttccacatttttaggtttttttctctatgtgtacaccttgcaagatgtatcattaactcatgaaaccaccagctcctcaggcaacgaaaagggaggtagaaagaacgccagaaaggtgggtctgtgtgttctggggtgcgtggggcccgcccccgaggaaggtgccaaccgtccctggagagcagaatcaccaggcctgggaaagccatgcgggttcgagagcctgcgccatggccatgctgggcagggcccaaggggtgcccaggcgtctgcccactgagaacactgttagtgcggagggatccacaggaggggagagcggcgccagggtcccggacacaggcaagggtctctagcccgccacccacccactgccctgggggtctctgtcaggcttctaggagacacagagactctgaggtcatgtctcgagggtggc

SEQ ID NO: 788 - DNA, 812 bp, HUMAN
  misc_feature (1)..(812): N=any base
aaaattttaaatctttaatttccgttttcacgtattttcttcttgcttccaaaaggaaaggagtgcgtagctctgttgcctgtacatcgtccacagcccctgggtcggggcggggtcccctgggccgcccggggggtccacatgcagcccctgggtgggggccggcgcggggtgaggtccgggggccgccttattgctgaggtccggccggttggggccgccgctaggcgcgctggctgggcagctcctgggagatgaagcgacgcaggcgctccaggtactggctgtagagctcgatgtcgttgtgcccggcgccctccacccacagcggctccaccgccttggggcagcgctcgtagagcgccagcccgtgcgagaagtcgatcacctcgtcctccgtgccgtggatgatgagcacgggagacgtgatcttggacaccttctcgatgttagggaaggcgtcgaagcagtaggtcttcttggtgtcggggaaggcgacgcgcatgcccgaggtgagcggcgagtgcagcaccaccgcggcacactcgtagcgcgaggccaggtccacggtgggcaccgtgccgatgctctgcccgtacaggatggatgctgtccggctgatgccgtaccctgtgcgcanggcctgccaangcggcgtcatgtcngccatagagttccctctcgaaggcctgcccgagctggcaccgtaagccggagtagtcgtaggaagagangtgcagtggaggcgggagcccangccaatgtagaagctgctcatcctgggcangttccacggccatgccgtgcgagaa

SEQ ID NO: 789 - DNA, 668 bp, HUMAN
acggatattgtttcacgatgatagaagaggatgactctgggttgcctgtggtcacttctggttgcctaggactagaaggctcagattttcagtgtcgggacactcccattcctcatcaaagaagatcaattgaatgctgcacagaaaggaacgaatgtaataaagacctacaccctacactgcctccattgaaaaacagagattctgttgatggacctatacaccacagggctttacttatatctgtgactgtctgtagtttgctcttggtccttatcatattattttgttacttccggtataaaagacaagaaaccagacctcgatacagcattgggttagaacaggatgaaacttacattcctcctggagaatccctgagagacttaattgagcagtctcagagctcaggaagtggatcaggcctccctctgctggtccaaaggactatagctaagcagattcagatggtgaaacagattgcaaaaggtcgctatggtgaagtttggatgggaaagtggcgtggcgaacaggtagctgtgaaagtgttcttcaccacagaggaagccagctggttcagagagacagacatatatcagacagtgtcgatgaggcatgaagacattctgcgttcattgctgcagatatcaaaggtacagggttcctgg

SEQ ID NO: 790 - DNA, 514 bp, HUMAN
gcacgagtctgatggtgtgttttgctggttttaacttaaaagaaaagatatttatttcttttgcatggcttccaaaggccacagttcaggctgcaataggatctgtggctttggacacagcaaggtcacatggagagaaacaattagaagactatggaatggatgtgttgacagtggcatttttgtccatcctcatcacagccccaattggaagtctgcttattggtttactgggccccaggcttctgcagaaagttgaacatcaaaataaagatgaagaagttcaaggagagacttctgtgcaagtttagaggaagcgcggattctattactggaaactttgggactgaaaggccaaagcttctgggcccaccatcaacgcagctccgctttcatttctttcacatacaactttccacataagatttcatgcggaaaaaaaaaaaaaaactcacaaaggttttatactgaaaaaaaaaaaaaaaaaaaaaactcgagggggggcccggtccca

SEQ ID NO: 791 - DNA, 582 bp, HUMAN
gcgtcgacccaccccaaatgggtcctcactgccgcacactgtctaaaggaggggctcaaagtttacctaggcaagcacgccctagggcgtgtggaagctggtgagcaggtgagggaagttgtccactctatcccccaccctgaataccggagaagccccacccacctgaaccacgaccatgacatcatgcttctggagctgcagtccccggtccagctcacaggctacatccaaaccctgcccctttcccacaacaaccgcctaacccctggcaccacctgtcgggtgtctggctggggcaccaccaccagcccccaggtgaattaccccaaaactctacaatgtgccaacatccaacttcgctcagatgaggagtgtcgtcaagtctacccaggaaagatcactgacaacatgttgtgtgccggcacaaaagaaggtggcaaagactcctgtgagggtgactctgggggccctctggtctgtaacagaacactgtatggcatcgtctcctggggagacttcccatgtgggcaacctgaccggcctggtgtctacacccgtgtctcaagatacgtcctgtgg

SEQ ID NO: 792 - DNA, 422 bp, HUMAN
tttttttttttttgagacaaagtcttgctctgtctcccaggctggagtgcagtggtgcaatcttggctcactgtaacctttgcctcctaggttcaagcaattctcctgcctcagtttcccaagtagctgggattacaggcatgcaccaccatgcccggctaatttttgtattattattattattaattattacttttagtagagatggggtttcgctaagttggccaggctggtcttgaactcctaacctcaagtgatctgcctgcctcggcctcccaaagcgctggatttacaggtatgagccatcgcgctggacccaaagattggatcttctgagaacatcagagaaagactgtccttgccacccacattgcagcaaaactttcgaaccttgaactctgggttcataatctcacaactga

SEQ ID NO: 793 - DNA, 639 bp, HUMAN
acaattttaccagtgatcaaatgcagacaacttgttgctttatatatcttccatttttgcactgattgagaaagccttatactacctagtattttggagttacatgcccaaacataaggcagttcaactcctttcaattcttagaggaagaaaccagtacattcttgtcgtcccattcttttcacatactctgggtacaacttgtctttagatcaagggtaaatctgtgacactctctgattgatgtctatgagttaaggcaaactgtaactggcttacagattcatctgtagaacaatctgtttcacaagcccctcacttttctctgaatgaaagtaggagttcatgagcccatctgctaaaggatgtaagggatttgaagttgtgtctcagttgattcatcagcatgtccctgaagtgatctcccataagaaaatagaagacagggttgatgacactgttcagaaaggccaaaggccgtgtcacaatgtaaaaggagttgatgacgacctgagtgcactgatactgctttcaactcaccaggcgtgaagcgatcctcacataccgcatgacgtgatatggtgttaatagcacagagataattaccagtgccatgatgaccaagattgagaggcgttt

SEQ ID NO: 794 - DNA, 491 bp, HUMAN
aaaagaaaaagccccctttcttcccttttctgttttacttcaagggcataccttggaggtgctcagagaagcgtgaagtttgcactatggtggaggatggggaaagagttctaaagtgtctccagctgtgaacccaggaggtcaagtgggctattaaaatctaacgttgagtaaatgtgatagtgatgagaaaggaattttgtgtactgtaaccttgcagtagagatgcagctgtccttcgtgtgtggaaacacacctctcctttacatagttgggaacctcattagaaatgacctcagctgccccatatctacgttcctttcagcagttgtccaagtaggagtgtatccagtgaagacatatcaaatcacaaagtcattgtcattagagtgtacttgattactgggcatccttgtaatataatttcataccactgacacatgatacttgtaagagaacatctttcccagagtgcctcagaccttattgct

SEQ ID NO: 795 - DNA, 510 bp, HUMAN
acgcgtccgcagcaagtaaaaataggagactttggtctggcctgcacagacatcctacagaagaacacagactggaccaacagaaacgggaagagaacaccaacacatacgtccagagtgggtacttgtctgtacgcttcacccgaacagttggaaggatctgagtatgatgccaagtcagatatgtacagcttgggtgtggtcctgctagagctctttcagccgtttggaacagaaatggagcgagcagaagttctaacaggtttaagaactggtcagttgccggaatccctccgtaaaaggtgtccagtgcaagccaagtatatccagcacttaacgagaaggaactcatcgcagagaccatctgccattcagctgctgcagagtgaacttttccaaaattctggaaatgttaacctcaccctacagatgaagataatagagcaagaaaaagaaattgcagaactaaagaagtagctaaacctcctttctcaagacaaaggggtgagg

SEQ ID NO: 796 - DNA, 521 bp, HUMAN
gccaatgatgttgagctttattaatggcccctctccagaggctgctcagttgtccccagggaactcctcagagatcctctgccttcccacatatgagcccgaggacacctcgggagcagagaagtgaaagggtttccgggtcagacgctgcactccacgcctgcgtcctcctcgtggctgcagtcatgatggccccagctattcttggtgcagctccacagggtactctccgtgccccgacactgaacattatccagccagatctgcccagtgccagctcccactttgtacagggcccttcctttggagtaacccagcatgcggcagaagacaatggcatcagaattttgccactcgtcatcgcaaattgtcccccaggtaccactgtagtaaacttcagcccggcctcggttactactgccgacaatcctgacggacactgagttttcacctctttcacctttttctccctttactccttgctccccagaagatcctttcactccctggtctcccttctg

SEQ ID NO: 797 - DNA, 646 bp, HUMAN
gtggtgtctaagagtaactttattgaaaatactaatcctccatgttacttctgactggccctgagtctgggaaggccgccaaagtgtctaggtgatgtattactctttatggtagaacacctattcattataaacttcccccaatacaacccctgttgttgcagaaatcttaggctgtgacaaccatagctgcctacacattccttgtatcttggggtaaaagcacacgtgctctggaaggaatgtgtaggtggctatgggtgcacaatttcagggggttcgtgaactccagttaagacttgccctaattataccatgtaaataattcaataatgggcaattctgtagtagaaattttattcccacccataaaatatatcactaaatagctgaaaaatttacatattattttaaaacatagacttaaaaaatcatattagcttctccttagcaaaatgcttttgttttatgtatttacaagaatatactgtacttcaggtacacaattcactcaagccagcctgagaaggccttggatgcagatcaatgctccaataaagttcattatcagctcctcctgccttgtgacaggatgatttgattttacaaaagtccctttgaaaaacagagtaaacgcagacagctt

SEQ ID NO: 798 - DNA, 456 bp, HUMAN
  misc_feature (1)..(456): N=any base
tgcttttacagnatataaaacacttaaaatacagttgcttatttcatttcctcagtaatcctagagagtatttcctgcatcttattgatgaggaattgaagctgggatagcttctctcctgactcttgaagtccgaaaacaagtggacggagctgtagcactaagcctcagcctgctcgtcttcaacctgctcctggctgcagagtcttgattgactctgcctgtctccagtgtgctttcattcccttcagtgggtaacttgtcagacctcgtcttgtttttgagactttggtttctgtcttgccttcttcctaactttgggtattcttagttccaaatcctgaataactcctgtaaatggggcctcccagtagggggggttcctgtatttatattcacagatgtacgtattttaaatagttaacatctggaaatcagtattacatcttaaagttg

SEQ ID NO: 799 - DNA, 421 bp, HUMAN
  misc_feature (1)..(421): N=any base
ttttttaaattnaaaggagtttaattgagcaataaacagttcaagaattgggcagccttcccagccagagtaggctcggacactccagcgcagtcacacggtggaaggtttgcggacagaaaatggaagtgaggtacagaaacagctgggcttggctacagcttggcatttgccttatctgaacgtggtttgaacagttggctacatttgattggccaaaactcagtgattggcacaagtgtagtctgtttacacctccacttgtcacgatatacagacaaacctttagggccaaacttaaatatataaggaggcagctttaggctaaactttatttcaatacctgtattccaacactttgggaggccgaggcgggaggatcacttgagcctaggagttagagnttcagcccaagcaacat

SEQ ID NO: 800 - DNA, 213 bp, HUMAN
  misc_feature (1)..(213): N=any base
gnaccaggnaactctactattagnagggacgactgccttcaagcatccctgcaactgccacagcaggtgggggcagggctcgtgggaccctctggacagccaccaagatatctgagcaaccaagagtcccagccccaccagtatctgcttctgtagcccacggcaccccaaacttggagggacctncccactcccttnccccattcccaaagg

SEQ ID NO: 801 - DNA, 392 bp, HUMAN
  misc_feature (1)..(392): N=any base
gacagaatctcaccctgtcgcccaggctggagtgtaatggtgcgatctcggctcactgaaacctccgtctcctgggttcaaacggctctcctgcctcagcctcccaagcagccggaattacaggcgcccgcactacacccagctaatttttgtgtttttagtagagacgaggtttcaccatgttggccatgctggtctcgaactcctgacctcatgatccgcctgcctcagtctcccgaagtgctgggattacaggcgtgacacncgtgcccggcctattctcccagtaattcttgatgtgtagggtgcatgggaagggcaggatgtttgaaatatgtatatttgtgggaatgggttataattgaggctaattaaggtatggcctcatatac

SEQ ID NO: 802 - DNA, 341 bp, HUMAN
  misc_feature (1)..(341): N=any base
ccaggaagcccactgtaattcgaattccagccaaaccaggaaaatgtttacatgaggatccacaaagtccacctcctctccctgctgaaaaacctattggaaacactttcagtacagtatctggaaagctcagtaatgttgagagaactagaaacttggaatccaaccacccaggtcaaacaggaggttttgtgcgagtacccccaaggttgccaccgagacctgtgaatggaaaaaccattccaactcaacagcctccaaccaaggtgccccctgagagaccacctnccccaaagctttctgcaaccagaagatctaattaaggaaactgcctttttaat

SEQ ID NO: 803 - DNA, 513 bp, HUMAN
  misc_feature (1)..(513): N=any base
ttcccctgactcccatctcctagagggaaacnntcattaagagactggtgtatatctttatacattttactgtcttatttgtagaaacaaatgtttctgtatgaaatcattttttatatccttttctaccatttcttttataactcagctctctctcttgttctctctctctgtatgtgtgtgtgtatatatgtgtatatatacatatatatatatacatatactttaaacatctttttatggtgatagaggtgcatcgtttttagcaatttcgtagttgtcccctgtatgaagcagggggaaaggaagggctagtttcatgactgaagcagagctgctgtttgggcaagaacatcatctttatttagctttcataaaccatcttggttgtggaaaagacagcacagccaggatgggctgaaagtgcttggggatgtctaatctgcttagcataagnaccaaccaagattctggagaaagtcaggactcaagagtatgcaaatcaggnagctt

SEQ ID NO: 804 - DNA, 425 bp, HUMAN
  misc_feature (1)..(425): N=any base
atctcttcaactggaatgacaacagattaaaaaaaatgtgcaaccataaggacaccgtaacctatgagtgacatgctaaaccagaaacccaaaacaatgggagtgacatgctaaaccagaaacccaaaacaatgggactgatgtactaaaaccggaacccaaaacaatgggagtgatgtactaaaaccagaacccaaaacaatggaagtgacgtgctaaaccagaaacccaaaacaatgggagtaacatgctaaaaccagaacccaaaacaatgggagtgacgtgctaaaaccattacccaaaacaatgggagtgatgtgctaaaccggaaacccaaaacaatnggtaacttaagagtgaggctaaggcccttacattttggtcacactctcaactaagtgagaacttgactgaaaaggaggatt

SEQ ID NO: 805 - DNA, 446 bp, HUMAN
  misc_feature (1)..(446): N=any base
aaacatgtaatcttgctccntcaaaaacaatttactctcaaatggttcagaaaacaataacctgtatgtatgtgtgtgtacatatatatgtgtgtatatatataggtatatataatgaaattacatatatataattagatatatattagatctatatatagagatatgtaaatgaaatttcattatgttaacaattggtggatatggaagagtatgagggctctttaaaccattcttgtaacttttctataagtttgagattatttcaaattacgaatttaaagcagttcagtggtaggaagtgattttcatcttcacttggtggtctgttatgtgcctgcattgcagatatgattttgattcataagcatagctttgcttttctcagaaatcttttcctgctgagtcctcccttccctgccatccaagtacagaagagagcactc

SEQ ID NO: 806 - DNA, 367 bp, HUMAN
  misc_feature (1)..(367): N=any base
aaatttcggcangaggtngagaagagaatgcctgtgtccngagataattctgtaagnaaatgccagtccctaggnagagagaaccaaaatgtctaccngaccagatgtcaaggctacagtgggggacatttccagtgatggcaatttaaacgtggctcaagaggaatgctccaggggaagggatagtgggatgaattcttcccgctgttgtcaaacttaatgtatatgggnctcaaccacaggggatatccccagagctcctatgnaacactaggcaaattttgtgtttttgtttcagtccgccatggggctggccctccatctttgcagctctgtaatttttccaatttacacccccccaaatgga

SEQ ID NO: 807 - DNA, 401 bp, HUMAN
  misc_feature (1)..(401): N=any base
tgagccaagccccacatgtctgtgaaatgtggtcttctagccatagaagtagcttgtgctcctagggtattccttgaggctctgtatgaagaatgtccatttgtttgagtccctaacctacagaatattcctgaccatggaaatgtgatagataggagtaagcacatggaccaaaaggcctggaggctcatcatttaaggtacaagccaattatgtagtctttgaaagaatgctttgaaattcagcttgcttgattcaattcccaatattttcatttgtattaaaagatttggcccttacaggttaaaaacaatgtcagtgtaaccaagtgacatttcaantttgggctncccaacatgtggatatgacatcacttcatgtggaaatnggcgangtcccca

SEQ ID NO: 808 - DNA, 422 bp, HUMAN
  misc_feature (1)..(422): N=any base
tnnnntnantagaattgcaaacatactttagcctaagaagcaggaagagaaaattatactattctttaaaaagttctttagtagcaattggactactctttccctattatctaaatacttcagtagtacttagtacttctctttctccagaatctaattcacaagtaactatttgcattctatttccattcaaataaacacttttacctgatcatattctgaagcaccaggggtaaagaggccatcccagggnacagctcagctatcacacagcccagtgaccacatatcaatagcttcacaaaatgggtaacccaagantaatttcaggagctctaggcaaaaacaaaaaatatccggattaaaaanaaaaaaacnttatttgggggaaattaacttcatggncttaggtcccgttttggg

SEQ ID NO: 809 - DNA, 421 bp, HUMAN
  misc_feature (1)..(421): N=any base
aagagcctccaggacagtaattccctgtttaaagcttccctcttgatgagacattcttacagattgtggtccacagatgacctgcatcagaattgcttgtgatattgttaaaaatatagactctcagagaggattgtaggaagatggcagagtagcaagcaccagggaacttttctccttacctagacaataattgcacgggcagaatctgtctgatacaactattttggagttcaggagtctattgaaggcttgcaaatttcagggacagcttgggacaataaagtacagttaatttcagtcagtttcaggccttaggcacagtaacaggcttctccattcttcccngccaaccagccctggacaggngctgtgcnatgttttccccgaaaaacttgcacacagctttaggggccgggtt

SEQ ID NO: 810 - DNA, 455 bp, HUMAN
  misc_feature (1)..(455): N=any base
tgattacattccagccagggtgacagagtgagacccttctcagaaaaaagcaggggagatcattcccttaatctgtgagacaatgacccccatcttccagtttatatccaagaacgaatcaatgtagatacaggaacaaggatcccgaattaggctacaggagacacagatgccagtattggntctgctctaattagctacatggctttaagcagtcatgttacctttctgtctctgtgtcttcaactgtaaaacaaggtgggttcacctttactttcacaccattacacaaaaatttaacttcagtatggtattcagagggctttaaatgcaagagcttaaaacttaaccacttttaaaaaaaaaacaggggaaaaaaaaatcttttcacaatgttnggggttaggttaaaggntttctttagggattaccaacacccaaagggcaaattccat

SEQ ID NO: 811 - DNA, 386 bp, HUMAN
  misc_feature (1)..(386): N=any base
gcccaccttngcctnccaaagtnctggcattgcaggctgagcacggtgcccagcctgaacaccctttcctggtaaaacactccaaaaccaggaaaagaaggaatgtacagcaacaaaataaaggccagtcatgcaaggcccatggctgaaagtctttcagtcattttaggtgaaagactgaantctttgcctccaagatcaggaataagagaaggatgcccgatctcactacttctattcaacacaggntttgaagtcaggctggtcacagtggctcacanctgtaatnccaggcncttttccggnagttcgagggcaggtgggatttacatggaggctcttgagtttgcagnaccaccctgggccnacatgggccaanaaccccg

SEQ ID NO: 812 - DNA, 456 bp, HUMAN
aaagacacagttgtgcatgtctggcacaacctctcggcctgcaactgtgtttagtgataatgatgaactgtgtgtgtgtgactttgaaggattctgtatgtcaagtgaaaaaaaatgatgtctgacctccttacatatgtaaaaaatataccttcagagttcagcagtaagctggaagaagtagatgtcaaagaagttttgaactttgataataatgcttcagttattcattcattgactcggtggtaaaatagtcgaaatggttttgaatcagggttatgatagtgatgaagaaggtcaagataacaccacagaaaaggtgcttatagaagaagacatggtgaaaatgtatggtgggcatattgaaggattacggcagcgtgcattaacaacagaattgaaaaaccatgtcagtttttaaaattgaagagagacttctgagctaaaaaccatgtt

SEQ ID NO: 813 - DNA, 652 bp, HUMAN
  misc_feature (1)..(652): N=any base
gagaaaaggaaaaatcaaatgagattcccactaaaaatatcngaaggtcagatgacaccatactatcctgtgggaatgggaaatggtacaccttgtagtttgaaacagaaccggcccagatcaagtactgtgatgtacatatgtcatcctgaatctaagcatgaaattctttcagtagctgaagttacaacttgtgaatatgaagttgtcattttgacaccactcttgtgcagtcatcctaaatataggttcagagcatctcctgtgaatgacatattttgtcaatcactgccaggatctccatttaagcccctcaccctgaggcagctggagcagcaggaagaaatactaagggtgccttttaggagaaataaagagggtgtcggttggtggaaatatgaattctgctatggcaaacatgtacatcaataccatgaggacaaggatagtgggaaaacctctgtggttgtccgggacatgggaanccaagaagagcatattgaatgggctaagaagaatactgctagagcttatcatcttcaagacgatggtacccagacantcaggatggtgtncatttttatgggaatggngatatttgtgatatantgacaacccagacaggtgactgtaaactaagtgcaagatccgt

SEQ ID NO: 814 - DNA, 492 bp, HUMAN
  misc_feature (1)..(492): N=any base
acattctgaggtcctgcanttcagtgttaacatgtgaattttggggatacacaactgaaccataacacaaactgtgaattcttagcaccttaagttgtagaagagaacagagccactcctccagccattgctccaatggctctggttaagttgtagctcagtagagagcatgaatgctctcaaaaaagcactacagttgtcctcggtatccacagggggttgcttcctggatcccctcagacaccaaaatgcacagacattcaagtccctggtaaaaaatggtgtagcatttatgtataacatatgcacatcctccccgtgtactttacatcatctctacattacttgtaatacctaataaagtgtagatgctatnggaggatagttggatataccggnaattggttttttnaaaatttaaggngaattttttnaatggnttgggggttttttttccccccgaaaaatttttggggnccatggaattgtgga

SEQ ID NO: 815 - DNA, 458 bp, HUMAN
  misc_feature (1)..(458): N=any base
ctcactgaacaatgagacaatgttgaggactcaaatgaatcaaaccccgtgganatgacagaagtgaagaatctggtccctgtctttaaggagtttgcactccagtagaagacagaaggaacgtatgtttacaaaccacttcactggaagacgtcaaacaagctgaatgaaggggcgcttagaaaacgttaatagaagttctaagcgggagatgactccctactgggatgatgaaggatggcatcctagtgaagaagcagctcaaacattttgataaaatggcaacaaaatgcagacaccctgctccaggtattatttcaggtttagtacaagtctgttaataccctatgtggtttcattaggataactttttacctatccttgaggtcatccatattcttacaggccttccagtcaataatggaagagctcactctatacaaaaccaatatgcaagg

SEQ ID NO: 816 - DNA, 453 bp, HUMAN
aaggaatcgcctccggaatggtgagtcccaccaacaaacctgccagcagggcgagagtagggagaggtgtgagaattgtgggcttcactggaaggtagagaccccttcctatgcaacttgtgtgggctgggtcagcagctattcattgagtttgtctgtgtcactgaaactgaccccagccaactgttctcagttcacagccctgttttcaaagaattacacatctctaaaggcaaacagggcacggacaaggcaaactggagaggcaaactgtagcctgagatggcctgggcttgccatcacaggtattcaggtgctgagggcccttagaccaactagagcacctcactgcctaggaaatcaatgaaggggaaatgagttctagcggaccctgaaggatcagaattggataaagttcttattggcagagaggcaccaggattgaagtgacag

SEQ ID NO: 817 - DNA, 260 bp, HUMAN
gcacccacactggcgagcggccctacaaatgtccccgttgcggcaaggccttcgccgacagctcttacctgcttcgccaccagcgcactcactctggccagaagccctacaagtgcccacattgtggcaaggccttcggcgacagctcctacctcctgcgacaccagcgcacccacagccacgagcggccctacagctgcaccgagtgcggcaagtgctatagccagaactcgtccctgcgcaccatcagagggtgcaca

SEQ ID NO: 818 - DNA, 473 bp, HUMAN
caaattcctgactataatgtagcataagaattggttttttatgccccagagagaactcatcagtgaaattaacaaaacttacatttaaaataattagtatgaatgttaatgatcccaagtaaagtttttaaacaaaataagcaaacatttgggcctcagaataagcaaatttaatacatggacattcacaattagaatataagttcattctgagatatttatttactttgcagaaaattcccttccccatggaattgcttttgaaaatgtgatctcttcaagcatttgaagtataatttcattaaacacacataaccaacttatattgtgtaaattagggccttcctgactaggcacaaaactacctgcatttagtttaaatatgatctctttaaaaatttgtaaattaggcacctgccctcccccaaacacctttacttaccccagcttgtggaattgattccctctggctc

SEQ ID NO: 819 - DNA, 151 bp, HUMAN
  misc_feature (1)..(151): N=any base
gttctttgcagggctattaatatctaaatgattattaatgcaaggatggtaaatatttgctcaataatatattaaattacaatgagggatgaagttctctanagatcgtagaagtggcacttcttatgacctctggtttgcaacttttaag

SEQ ID NO: 820 - DNA, 465 bp, HUMAN
  misc_feature (1)..(465): N=any base
ttccttttcagttgtgtgtcttatcttgattgggtcatgagaaagttncatcttagtgctactgtgtcttgaacgcctctgggtgggagaacaggccttaggcttagagcctgcagcaggcagcagtatcttgctgggtcttaataacattgttttgcttttatctttatagttaccttgtgtttatgacaaaccttcaaaaagttttaaattttgaaacattgcataatataaaaatgtttttatttaagaaggtgagtagatttgaagaaaatacacattgagtattatctaaaatgcttgggacaagaagtgtttcagattttggattttttttttttgattttgtaatatttgctgtggagcgttccctaatctgaaaatccagaatgcnccagtgaacatttactttgaccatgcctggctaggtttttttttttttggaattttnannagaaanggggt

SEQ ID NO: 821 - DNA, 129 bp, HUMAN
aaccaactcagaccagaactgttttctcaacctgggacttcctaaactttccaaaaccttcctcttccagcaactgaacctcgccataaggcacttatccctggttcctagcaccccttatcccctcag

SEQ ID NO: 822 - DNA, 201 bp, HUMAN
ccgggagcagcgccggcaagtggagtcgtcgtattccgggcggcccgcggcccacggggatgggacgtcccggggctgtgctgaccccaaaacccttccacactttattagcctgtcgcccttctttcatgtttacagcaaatattttccgagtgcctaatgtgtcccacttactgtgccacgtgcgagggtgcacgtgtc

SEQ ID NO: 823 - DNA, 136 bp, HUMAN
ggatgaattcagaatctttttcattccaaaacttcctgcatataatggtagcaacccacaatgagacattcttttagtttctaaaagcaggaaataagcattttcctgaaagtttcctcatctcttcatcatacac

SEQ ID NO: 824 - DNA, 109 bp, HUMAN
ataagacactgtactttgacgtggagccgttcgtcttttacatcctgactgaggtggaccggcagggggcccacattgttggctacttctccaaggagaaggagtcccc

SEQ ID NO: 825 - DNA, 329 bp, HUMAN
  misc_feature (1)..(329): N=any base
gtcagatggaggaggctcagaaaagggaagggggtcatatagaggaggcgcaganaagggaaggggctcagatggaggaggtgcagatnnngggaggnggtcanatggaggaggctcagagaagggaagggactcagatggnggagggggcgcagagaagagaaggggctcanatggaggaggaggcgcaganaagggaaggggctcaagatgggaagggggccctggaangtctcggctctncttctgtaaaatcnggggagttttcagggtgaagggantncagtctgcangctgggatcccccctaatttncnanccggcttgctc

SEQ ID NO: 826 - DNA, 248 bp, HUMAN
gtggggctggtgcccgtggtgggcggcgaagagagctgggggggtcccctgctggccgcggctgtggcctatgggctgagcgcggggagttacgccccgctggttttcggtgtactccccgggctggtgggcgtcggaggtgtggtgcaggccacagggctggtgatgatgctgatgagcctcggggggctcctgggccctcccctgtcaggcttcctaagggatgagacaggagacttcaccgcctc

SEQ ID NO: 827 - DNA, 228 bp, HUMAN
ccagtggggagaaagtcggccagacatcactggaggaagaaagaggaggggggcccctattaaccctgggcctcctggcttctctgtcgtcaccgcagagggagtgtggtgattgagaaacaagacagcttcaacaagaccggcagtggggtatgactcaccttccagaagccaaaggcaaagaccagaccgctccccaatactctcctaaaataaacatgaagcact

SEQ ID NO: 828 - DNA, 424 bp, HUMAN
tgcaaagttcagagatcaaaaatgtctcccaagttttccggcaacaaattgccgaggttgtatttgagtcagttacttaaggtgttttggtccccacagccatgccagtagcaacttgcttgtgagcaggcctcagtgcagtgggaatgactctgccatgcaccgtgtccccggccgggcctgtgttgtgcaatgctgtacatcacaacaggagggtagggggacaagagagcacaggtcctggcagctgccacagtctccaggggcttttgcgtttctctccagatttctaaggttaacatggggattagctgttttgcaatgaataaaaggtaacattgcctggaatgttgcttaaagacacttttttaaagctagttgattgttaagctgttgctacttaaattgaaaaactacttttggg

SEQ ID NO: 829 - DNA, 209 bp, HUMAN
ggagcattccaggagagaaaggtgagtgggctgggtcagttgaggactttatgaaagggccgtggtagtgtgtcctgtcacagcaatgaagaagaatttggcaatagaagtcacatttggtgcagaagtggtagacatggaaacagcacagtgaacagctggacgaggctgaccaagagaactgtcctgagggagtgagttttcactgc

SEQ ID NO: 830 - DNA, 211 bp, HUMAN
cctacttgcgacaaggtggacttgggaggaaagccgtctgccaaagcctgaagcctccaagttctgtagttcaggaaccttgtctgttgtagcagggataaaacccacaagaacatggatacagaacagttttggaatgaacattgccagtgctacaattgcactagtggggactgcttttctctcactaaatatagcagttaatatccag

SEQ ID NO: 831 - DNA, 308 bp, HUMAN
gtcgggctttacggcgccggatggctctggacgtgaagtctcgggcaaagcgttatgagaactggattccttggggagggacagtttgccaccgtttacaaggccagagataagaacaccaaccaaattgtcgccattaagaaaatcaaacttggacatagatcagaagctaaagatggtataaatagaaccgccttaagagagataaaattattacaggagctaagtcatccaaatataattggtctccttgatgcttttggacataaatctaatattagccttgtctttgattttatggaaactga

SEQ ID NO: 832 - DNA, 240 bp, HUMAN
cgtcaagacgggacccagccagcatgcgtcgtgacagcttggggcattggaggtgggtgttagtggttagaagaaacttcccagcagagcgggttgctggagccaagcgcgcatctgtcaagaatgctctctgggcgctgttcttgcaaggatcctctgttgaacctcgagtgcagtagatgtggaaaggaagcgaaggtttgtgcatctaacagctaacgctgagggccctttggaatc

SEQ ID NO: 833 - DNA, 381 bp, HUMAN
aaactttactgaaataaacaaacaagaaaactggatgaggtctccatcttgttttatgtcctcgggaatttgactttgtgagaacatggcggtactttctcttggtctccggcttccaaggaagaagaattttaaagttcatgtcatagttaactctaaaaattaccttaagtagttaaaagcctttacaagctcaaaattaactactctagactccttccggaaagggcaatataaaccacccagtgctgtaactcagtaactaagattttgtcctttcatagtgacagcccaggttcaattcctgacttaggaaataagtcctttcttgtttaatatctgcataaccattaccatttgttgattgtcttccccttctgt

SEQ ID NO: 834 - DNA, 164 bp, HUMAN
  misc_feature (1)..(164): N=any base
tgctgtgtcactggccatggttactcatatttggcttagaataaatctcttcaaannnnnnnnnnnnnnnnnnnnnnnntaaaggaaaaacaaatgcttttgcagaagccaagaagaaagtgaagggaaataaatgagagtggaaaaacgagagatcaattgtg

SEQ ID NO: 835 - DNA, 324 bp, HUMAN
atcctgatacttcgctcctaaatcatctttttttccctaagtcttttgtatgcaccactaaaaaaaaaaaaagccatttttcctgcatgacccaacagaatgggctgtaattagcttgtaatatatgcaaatgtccatctggattctgacttcccaagctgcatggctgccttcatttgcaggggggaggtttgctgcagaggggggcagcatcagcaggcgtgtggagtgagtgagccccgtcctccccctcctcctgacattggctctcattgcctaacccccttgtgtcttggccccaggttgattttccgggggtaccgc

SEQ ID NO: 836 - DNA, 295 bp, HUMAN
ggatggactcccagcaggtatgggacaggtgccaggtgtgtggtggggacaacagcacgtgcagcccacggaagggctctttcacagctggcagagcgagaggtaggcggcctccctcggggcagaagctgggcttcccccagcctccaagatggccacagcccagagcgttggtgcaggggctgctcaggtcacagggcctgcacactcactcagccctggatgcctcctgtggtgtcagcgtctccctcttccacttcgccacccttctgtggcaggctcaggttttggcctt

SEQ ID NO: 837 - DNA, 375 bp, HUMAN
  misc_feature (1)..(375): N=any base
tggagaacaggtgtgagaatggcatggcatatacagggagggaaggatgtattaaagaagannnnnnnnnnnnnnnnnnnnnnnnnnnnnnnnnnnnnnnnnnnnnnnnnnnnnnnnnnnnnnnnnnnnnnnnnnnnnnnnnnnnnnnnnnnnnnnnnnnnnnnnnnnnnnnnnnnnnnnnnnnncatgtacaacattgcccatgatgtggaagtcaaggggcaggtcagcgctgtaggccacataggctatggcaatggatgattagtaggtgcccactaccgggagatgggagctgcaggtggagaaggctttggagcgtccttcttgggagttaatgcgaacgaccgaggtcaagatgtgggcataggagag

SEQ ID NO: 838 - DNA, 221 bp, HUMAN
  misc_feature (1)..(221): N=any base
gaggtttcacagcaaaggccccaccctcaagcctggaaacctgcagccctaaatgagaacaggcattcctgtttttgcggccaaannnnnnnnnnnnnnnnnnnnnnnnnnnnnnnnnnnnnnnnnnnnnnnnnnnnnnnnnnnnnnnagctccactggcagagcancaaaatggtncagcagngaaatagngaagaggngaagcntntnaacatgaagaa

SEQ ID NO: 839 - DNA, 150 bp, HUMAN
gcccccaacaactgaatggacccccttgcggtcaaggggacaccagtggcaataagataccaaattatgaataggacctaaggtcatgccaggcaagggttaagtcacacaccctacatttaaactatattcctactgccacactgcttt

SEQ ID NO: 840 - DNA, 78 bp, HUMAN
aagtcccccacccttggacatttagattttttccatctttctgtatttgcagatatgcttctacgtacacctttattc

SEQ ID NO: 841 - DNA, 117 bp, HUMAN
acacacatggagctgtcatcgcctgtggtaacaatgccttctacagtacttcccaaagggcctgctagttcacttaattcttttatagagagaaggagtacactctaacactgatca

SEQ ID NO: 842 - DNA, 126 bp, HUMAN
gcagtttgccctccgctcacgcagagcctctccgtggcttccgcaccttgagcattaggccagttctcctcttctctctaatccatccgtcacctctcctgtcatccgtttccatgccgtgaggtc

SEQ ID NO: 843 - DNA, 443 bp, HUMAN
  misc_feature (1)..(443): N=any base
ctccagacagcatgaggctccctcgaaccgcccccatcaaatgctcatgtcaggaaatcatctgatatatgaattcacatcgagttggcaatgcctgataaggcttggggtgacctctccataggggatgaagtcaagatggcagtcagaaccacaagggaatggctcagggataggtgcctggaaagggtcacattttcggaaatcctagtcttcagtgtcctggatctgtatgccttaccattttccattcccagccagaaatgctcaaactttgctgtgttcctgatcttgctcctgactcgtatgagtgtgtctgtgaaagccaagattaactcctttgattttgtagactgatgtgcnaatctggcaggtctgactttcttagctgtgaagatgcttgggcacaagtaccaagactgatctgcttnctgcgtgtgaca

SEQ ID NO: 844 - DNA, 91 bp, HUMAN
caaccatcaggagtgcctcaagggagaaatatcctctgagaatagccacagacaaagtggggaggtgggactacaatccccagccctggaa

SEQ ID NO: 845 - DNA, 245 bp, HUMAN
aaactaaagagagaggatagataagacatgctgcagttcttgccctaactttcaatcccaacaactgaaatgtcttccagagaagtaactccccccggtagggatgtagcgcggtccctacgtgggtctaagggatctgacccacgacgcactgcactgggttcacgaagcgcctcctcgcaggcggttatctcggtatctctgagagcggcgggctctcgctcccgctccagggattcggggca

SEQ ID NO: 846 - DNA, 355 bp, HUMAN
  misc_feature (1)..(355): N=any base
atgtgagctctcctccagcttcccagcagcaaccactgagcacttaccctgtgctgggtgcttgctaaacactttacatgcatgatctcacagaattctaataataatccttcacttattatcaacttcccgagaaaggaaagtttaagcagctaacccttggtcctacagctggatggcagctggtagagttgagacatctctcttgcgctagacagggaatgaatctgagtgaaggctaagaggatgtctgcnnnnnnnnnnnnnnnnnnnngacataaactaatgcctacagctagctaattaaccaatcaccatcagttaaataacttttagcaagaaattaaccagtcca

SEQ ID NO: 847 - DNA, 432 bp, HUMAN
  misc_feature (1)..(432): N=any base
gtggtgtggctgcagtggagagttcccaacaaggctacgcagaagaccccccttgactgaagcaatggaggggggtccagctgtctgctgccaggatcctcgggcagagctggtagaacgggtggcagccatcgatgtgactcacttggaggaggcagatggtggcccagagcctactagaaacggtgtggaccccccaccacgggccagagctgcctctgtgatccctggcagtacttcaagactgctcccagcccggcctagcctctcagccaggaagctttccctacaggagcggccagcaggaagctatctggaggcgcaggctgggccttatgccacggggcctgccagccacatctccccccgggcctggcggagccncacatcgagtcccaccacgtggccatctcagatgcagaggactgcgtg

SEQ ID NO: 848 - DNA, 456 bp, HUMAN
  misc_feature (1)..(456): N=any base
aattgccagcctatcgaggctaganatatctcctgatccttgggaatgcctttactgcctgggttgaagcctctcatactagaatagaaaagattcaggtagttgtcaagatcattctgaaaganattatctctttgagcctccacagtcttcacaaagtaacaatggcctatattttatttcacaaactacccaaacngtggcaaaagccctagggatataatacttttcacactcctcctgaaanccacaatcttccaggaaggtaganaggactaatcaagctattaaaaggacctcgagcaaatgatgccaggnagcctctttaccatggctaaaacttctacccatggcacttcttcagatcagaacagcccttaaattacgctatggctagttctttgaagcctatactggagacctttctacatgcnaanctatattatacccagaggt

SEQ ID NO: 849 - DNA, 474 bp, HUMAN
  misc_feature (1)..(474): N=any base
aagatacccagattgtcactgaaagagactcaccgtctatccttatctacctttttaagtccttttaggcagtattataaagcactaaatctctaattaaagnnnnnnnnnnnnnnnnnnnnnnnnnnnnnnnnnnnnnnnnnnnnnncctcagattccaaatccagacactcaaatcccttatataaaattgtatagtatttacatacaatctatgaacatcctcccatagacnnnnnnnnnnnnnnnnnnnnnnnnnnnnnnnnnnnnnnnnnnnnnnnnnnnnnnnnnnnnnnnnnnnnnnnnnnnnnnnnnnnnnnnnnnnnnnnnnnnnnnnnnnnnnnnnnnnnnnnnnnnnnnnnnnnnnnnnnnnnnnnnnnnnnnnnnnnnnnnnnnnnnnnngattaggaaagacaaaagtccgtgatatgagataatacctcaattttttaagtggttctgaacattcctgag

SEQ ID NO: 850 - DNA, 529 bp, HUMAN
taccctgcttcacgtgcctaagtctggggtcttttctcataacccctcctggaatctgagggagaatccaggccagctccagtaaatcccacccatgtatccttttatttccatctgaaaagagtttggaatgaaacaagcgttttcagaatgagcttcctcacaggactttgtgcttatcatgctgctgttttagcttctccagtcctttctcactctatccctcaccctttctgggtcactgacagtccagcttccccctgcaaagcatcctgggaaaacttgagttgtgttcccagagttgacaagtcctttctgatttcagatacgtcacactgtcaaatggaacctgcatttttaccccccttttcagctggcgttggacatctttgaggtgtcctgaagaggagggtggttatttggagactatcagtggaaatgaagagctcagctgatggctgtagatcctcacccacatggtccctcagccccgaaaggttttacttgagggctggttcctatttgataa

SEQ ID NO: 851 - DNA, 402 bp, HUMAN
aggaattaaaagaaaatatgatttaaatgacttgacaaatagggaatctaaatagtgaaatacaaactataaaaagaattaaatggaaattctggagttggaaggtacagttaccaaaattaagaattcactagatgggctcaatagcagattttaagatagtggaagaaccagtgaacatgaaaatagaccaatagaaatgatccaatttgaaaaacagagagaaaaaaatgaagacaaatgaacagaccttcagacacacataggatgatgttaaatgtccccacatacatgtaatgggagccccaaaaagggagagacaaaaatattgatgaaaaatattgaattgcagatttttttaaaaaaagctcaaccaacactgacttttataaaacagaaaga

SEQ ID NO: 852 - DNA, 216 bp, HUMAN
attaggtggcagagccagctccactctgcgtgtgcccccgactctattccgcttgtgagccccactcggaaagtaggcagcggtccggacttcccttagagtcttctaacttaaaaatcgggcggcggcacattcctgggaaagggaatgtgtcttccctgtgaatgtgtctttcctgtgaatgttctctgcaaaagtcagatagcttaatcagac

SEQ ID NO: 853 - DNA, 278 bp, HUMAN
cctcgccagcacagggtgggatcagacggtctgatctgtgccagtcaggtggaagagtcctctcgtaggtttgcttggcatctttctgtttaaagtcacattgggtggttaaggagccaccaaacgggctgcccatctcctctgctggactggagccaaggcaagagacctggctgtgttgggcatgtcctttctgtagctaaagtccctggagaccccagtgacctgagagtcgggcagatcccaggaggtcttctggggtggtctctgttcaaggg

SEQ ID NO: 854 - DNA, 497 bp, HUMAN
ataaaaaatgggtctctgatgacgaatctggttatatggcaccagcagctgaggccaaaagcctggtagcctgccaccaagtgtaccccgaaagaggggtgtgtgggcccgagtcacctgggtggtcctttcaggatttgtggctctgaggtggcccctggtgctggcatttggggaggtggaggggatagagggaagacattctgggcgaagagtggaagatccataggttcctcggtgaccctcatggggacagtacacccgggagattcatgttctccaggtacccggagctcacggactgaccctcttctcctgcctcctctggcctacgtgctccgggtagatccactttccttgaaggtgggggtggtggctgttgggcctggggaatcttttgctgtttacttggggaggctcaggctctcacggttgacctctgcccagttagtttcatgtaagtagagcaacctagtttcacgaaggaagcaccaggc

SEQ ID NO: 855 - DNA, 353 bp, HUMAN
aaaataggtattaataagaaaaagtgatgagtaaagtgccagtgaccagaaatgggctcctgtgtaggctgccagctggataataaagccctgaataaccaataagtgagcatgaaagtaaaattttgaatgttcattatgtgtgactagcttacaactggccttttcaagacaatatgatagttttaaatctttatttttcttttatttacaaacttatttacttttcaggtgtatgaaatctgaagagaagtcccttggtgtgggattacatacattttgcacaagagtatttggtaaaaatagttattttttcccacatcctatcagaacaatattattcttattatttt

SEQ ID NO: 856 - DNA, 421 bp, HUMAN
cgtggacatcgtgggccccactgggggcatcatccactcctgccaccggactgaggagaacgtgaccggggagcaaggggggccagatgtggtacaaccctatgctgcctatgctccttctggaaccccacagggcctcctcgtctatgccaaccggggcgcggaagaagactttaaggagctacagactcagggcatcaaacttgaaggcaccattgccctgactcgatatgggggtgtagggcgtggggccaaggctgtgaacgctgccaagcacggggtagctggggtgctggtgtacacagaccctgccgacatcaacgatgggctgagctcacccgacgaaacctttcccaactcctggtacctgcccccctcaggagtggagcgaggctcctactacgagtattttggggaccct

SEQ ID NO: 857 - DNA, 276 bp, HUMAN
  misc_feature (1)..(276): N=any base
ggtgcacgcatctcatgtctgaatctcctctttctcccttctttctttcctccctcccaagcttacatacctttgttaccggctggtgttgtgaagtcnnnnnnnnnnnnnnnnnnnnnnnnnnnnnnnnnnnnnnnnnnnnnnnntgtagcaatgcagcaagagacttattaagcacagtaacactctcagagaggggagaacgggctgacttctgcaaaatgggatcagcgtcagtttggtgaactttgggctttgggtctttttacatgtttt

SEQ ID NO: 858 - DNA, 102 bp, HUMAN
gcgttctcctagaagacagaattcttacatgccccgtctccatctagcaggaaaagccatatcttgcaccagcagcatgaatggtccctccacactctgggc

SEQ ID NO: 859 - DNA, 236 bp, HUMAN
attctgtggtatccatcttctgaagctgaacttggtcgctaagcaacaaagcagatgtgaaactgtgtgtcccttattaggtgtctcctattaggcagaaaggagttgtaaataagcaaaatagtggtaaaaatttttggtagcagtttagtagcacagcatcttcataatgctatatgttttttaaaatagtattttatccatagcacaaaaggtgcctaagataagaatttctg

SEQ ID NO: 860 - DNA, 192 bp, HUMAN
  misc_feature (1)..(192): N=any base
gaanaagtaacagacaccatcagcaggtgcctcactcctgatgtggaagctcgtccagatattgtagaagtcagttcgatgatatcagatgtcatgatgaaatatttagacaacttatctacatcccagttgtccttggaaaagaagctagaacgggancgaagacgcncacaaaggtattttatggaagcc

SEQ ID NO: 861 - DNA, 185 bp, HUMAN
gcccgtggggtgcaaaagatcctgcaggtgagtatattactatgtgggatcagtgtctcgaaagtcaaaaagagggcctgtggggactatatgaggactggatctttctttgtgatttgttttggagcaaggaaagttgaggctggcaattgctagtgagagctaatgaggtctcttgagtttcc

SEQ ID NO: 862 - DNA, 541 bp, HUMAN
  misc_feature (1)..(541): N=any base
gggtacctgcccatttctgggcttttacataaaaccctgtaagtgggttntggggacagctgtgtaacatgcacaaaaaataaatggaggaagaatgcattatctaaataggcactgacttgcgtgattgaagctgtaaccatcctttgcagcccagagttgctgtgacctgtgtggagaggtgggagggccaggcagagagtgggtgtgaaagccacggaggatcccagggagtggattcctaagtaggaggcgaggcaggtcatcagtgaggatcccagggagtggattcctaagtaggaggagaggcaggtcatcagtgaggatcccagggagtggattcctaagtaggaggcgaggcaggtcatcagtgaggatcccagggagtggattcctaagtaggaggcgaggcaggtcatcagtgaggatcccagggagtggctgcagtgactgtgcccagcaaacctccttaaggccctgccctggtgcctgcggctctaggagattccctgggtagtcccagcacacgcaacctgttcag

SEQ ID NO: 863 - DNA, 150 bp, HUMAN
ctgaataagcctctgatcccgcctgcatgggccagccccctaagccatctgtgccctgcaggccacactgggatccaatgtcccactctgaaccccagatatcaagctccacagcagaacagatttatagtaattctgaaacttttcaag

SEQ ID NO: 864 - DNA, 483 bp, HUMAN
gcaggcccgtggctctcctgccctctgcatgcatcgcgagtactgccggaggaggcccctttggctttcagagcccagagcgcccgacctcctccaggagtctgcagatccacaggcctcagatgctgccacacccacccagcacacacccaggtctctgacacgccagccgcacacagcggtggggttcaggcgaaggtttcttccacagtgcagagtagaagagccgggaaggaccccatcaccatcagatgcatcagagcttcaaaggcccgcccatcaagacgctgccaaggagcatgaggccagccaggctggggaggacgttggcgagcatccgcctgcccgtcagggagccacagctggatgatacatcgacagacagcagagggacggtgtagcacacaggcgagggcttgtccccctcagcctgggggagcgccgctcagtgcttggtggtcagcacgtgactgacactttgcc

SEQ ID NO: 865 - DNA, 218 bp, HUMAN
gagccagggagagtgcttttgggctccagccccatggtaacgtctaggagtgtgttacaattaatgctcttttagtagttgccatctacagatggctaagtgtgtaagtcagagtgaagccttttacactctgccctcttgttacctgagtccttgtctggcatccaggaaggataaggtcacacatggacttgagggtggtgaatgcagaggtttta

SEQ ID NO: 866 - DNA, 519 bp, HUMAN
atttatttcagtcttctgtgtctggcttgtttggttttcagtgggtatgtttgattagagattgtttgtaatttacctgtttaatttcttttttgttctcctgctatgtggctgcctcctttttggcactagatggtgctttaatccctggttcatcttggctctagtaaacctttctcttgctctctcaatctctctctttctctctaatcttttatgttttctactaaattatgagcaccaggggccatgttattaggtatttttttatgcttggtaaatatgtcttgataattacatgtgggtgtattgtataataagtatgatttaagtcaccaaggtaagggttcttaagctgggtcccataaactccttgacatgttgtgtaaagttgtatgttatatgcatgtatgcattttctggggtgtaggtctgtgactttcattactacctacttcatgttcatactgtggttaagaactatggtagcaagacaatatcagacatattataaatact

SEQ ID NO: 867 - DNA, 491 bp, HUMAN
acaaatctttctcttagaaaaatatgttcttaatattgcatgggatatacttatactaaaaaattatttgttgtttttctgaaattgaaatctaactcggagtcctgtattttatctgagagccccagctggggacgggcgcggggccaagagagctgcgagggaggaggggttgcaagcttctttcgggcggaggggtcacaaggcgaatggagaaggtgacaaggagcatggagaaaccaagaaaagggctaacgcttggagagcaaggatggaaagacgctcaaagcggaggcggaacggtctgagtgattccaaaactagtgtgtccaagctggttagaactcaggcaggcgggtccagaagccgaggggcctgacagatacgcaggtgaagtccatctgtggtccgcgtgctgggcgtgggcaccgggctagtccaagcattcctggtaaaggctcctccagagtggtaccacagcgctctattaa

SEQ ID NO: 868 - DNA, 465 bp, HUMAN
ggaggcacaaaggtgaataaactcatcaaggagcttacagtttaatggggaagacagagacattatcaggtacttaaaaaatatgctgaagaccttagctaaagaaactttagaaatcaataatatggagttttccccaaaactaaaaatactctgcccccactgtgttcacaagatcagcatcaagcaaagattaatctcaagacttgttgtttttcttgttgggttttggacttacttgcaacccctttcttcttatttctcccttttggaatgggaacatctatcctatacatgtcccaccattgtattttggaagcacattaacttgtttgatttcatgggttcacagctggagagcagtttgcctcaggatgaaacaaacctttgagtctcatctgtgtctggtttagatgagattctggtttttggacttttgagttggtgctggaagaagttaagact

SEQ ID NO: 869 - DNA, 515 bp, HUMAN
ttttaaacatgaattttctaaatattatgccaagtaaaatgagctagacacaaagggacaaatatcagccaggcgctatggctcaagcctgtaatctcagcacattgggagactgaggcaggtggattgcttggattgcttaagtccagaagtttgagactttacaagaaatacatatattagccaggcatgcaccttgctaatagtcccagctacttgggaggctgagatggaaggatcaccttgagcctgggaggtcgaggatgcagtgagccgagattgcacccctgcactccagcatcctgggaaacagagtaagactctgtcttaaacaaacaaacaaccaaaaaaaaccccaaaaagctaagaaggctcggctgggcacggtggcacacgcctgtaagtcccaacacttcgggaaggccaaggtggatggatcacttgaggtcaggagtttgagaccagcttggccagctggtttgagaccagctcattttgtacttttaggtagagat

SEQ ID NO: 870 - DNA, 543 bp, HUMAN
ttgatggccaaacaggtttatttacaagaataagcctgtgaggggtcccagtcaggaatgtggctgagaccctgtcacttagaaactgaggtttttataataaagtttctataggggagggtttgcgtaagtgctggcaggttggaactgttgggggctggagaaggatgtggtaagggccatcaggctctgttgtggttagggttgttatgctctattaaaagtatgggcaaggttgacacctgctttgtttctgggaacaccgtcaccaaggtagaaaacagtcaccaatgtagagaaatggcatcgctcttgttagtccccacatttctttacagcattgtgagaagggacgaatacaggagccatagatttcaagggtcctcccttacccctcctcagcccacgtctgcagggcctccgtgctgcaggcaaacataggcccctgaaggagatcacatcagacataggcagacaggcacatggtccaaataagtgcctgtccaccagtggggacctgatgttccaggcccagtggctgca

SEQ ID NO: 871 - DNA, 372 bp, HUMAN
aactttttaaaaagcaaatgtattcttcctccattatctaaaaaagattggcaaaaagttaaatctccttttacttcaaaagtaaagaaaatcatgcaatgagatgatcctgttgggccttcagcacagacccatcctctcttccccggctcccagcagtccagggcaggtttctgtcctcagcaggctgagttttgttcagtccattcgttccttgctggatcagcacactctggatttctcagccctttcagtctgagtgttcctccctcatggccttcacaagccagtcctgttctgtcccctgctcagagtcactggtgtcactcacctccatggacagcagcttcgagtacttgattttccgctctc

SEQ ID NO: 872 - DNA, 380 bp, HUMAN
tttttttttttttttttttccggattgaggaactctctggaactgtctttcttcaagagagcatttcttataatacagatctggtagtggtgaattctctctgcttttatttgggaaaaactttatctcttcttcatatttgaataatagctttgcttgatacagtattcttgtatggccttcatggttttgattgagaagtctgtggccaggtaaattagagctcttttaagtgttatttccttcttttctcttactgtttctaggatcctctctttgttcttgacctttgagagtttgattattatatgccttggggtaatcaaatctatttggtgttctctggcctttctgtacctggatatttgcaatttttgaat

SEQ ID NO: 873 - DNA, 13509 bp, HUMAN
ggggcatttccgggtccgggccgagcgggcgcacgcgcgggagcgggactcggcggcatggcgggctccggagccggtgtgcgttgctccctgctgcggctgcaggagaccttgtccgctgcggaccgctgcggtgctgccctggccggtcatcaactgatccgcggcctggggcaggaatgcgtcctgagcagcagccccgcggtgctggcattacagacatctttagttttttccagagatttcggtttgcttgtatttgtccggaagtcactcaacagtattgaatttcgtgaatgtagagaagaaatcctaaagtttttatgtattttcttagaaaaaatgggccagaagatcgcaccttactctgttgaaattaagaacacttgtaccagtgtttatacaaaagatagagctgctaaatgtaaaattccagccctggaccttcttattaagttacttcagacttttagaagttctagactcatggatgaatttaaaattggagaattatttagtaaattctatggagaacttgcattgaaaaaaaaaataccagatacagttttagaaaaagtatatgagctcctaggattattgggtgaagttcatcctagtgagatgataaataatgcagaaaacctgttccgcgcttttctgggtgaacttaagacccagatgacatcagcagtaagagagcccaaactacctgttctggcaggatgtctgaaggggttgtcctcacttctgtgcaacttcactaagtccatggaagaagatccccagacttcaagggagatttttaattttgtactaaaggcaattcgtcctcagattgatctgaagagatatgctgtgccctcagctggcttgcgcctatttgccctgcatgcatctcagtttagcacctgccttctggacaactacgtgtctctatttgaagtcttgttaaagtggtgtgcccacacaaatgtagaattgaaaaaagctgcactttcagccctggaatcctttctgaaacaggtttctaatatggtggcgaaaaatgcagaaatgcataaaaataaactgcagtactttatggagcagttttatggaatcatcagaaatgtggattcgaacaacaaggagttatctattgctatccgtggatatggactttttgcaggaccgtgcaaggttataaacgcaaaagatgttgacttcatgtacgttgagctcattcagcgctgcaagcagatgttcctcacccagacagacactggtgacgaccgtgtttatcagatgccaagcttcctccagtctgttgcaagcgtcttgctgtaccttgacacagttcctgaggtgtatactccagttctggagcacctcgtggtgatgcagatagacagtttcccacagtacagtccaaaaatgcagctggtgtgttgcagagccatagtgaaggtgttcctagctttggcagcaaaagggccagttctcaggaattgcattagtactgtggtgcatcagggtttaatcagaatatgttctaaaccagtggtccttccaaagggccctgagtctgaatctgaagaccaccgtgcttcaggggaagtcagaactggcaaatggaaggtgcccacatacaaagactacgtggatctcttcagacatctcctgagctctgaccagatgatggattctattttagcagatgaagcatttttctctgtgaattcctccagtgaaagtctgaatcatttactttatgatgaatttgtaaaatccgttttgaagattgttgagaaattggatcttacacttgaaatacagactgttggggaacaagagaatggagatgaggcgcctggtgtttggatgatcccaacttcagatccagcggctaacttgcatccagctaaacctaaagatttttcggctttcattaacctggtggaattttgcagagagattctccctgagaaacaagcagaattttttgaaccatgggtgtactcattttcatatgaattaattttgcaatctacaaggttgcccctcatcagtggtttctacaaattgctttctattacagtaagaaatgccaagaaaataaaatatttcgagggagttagtccaaagagtctgaaacactctcctgaagacccagaaaagtattcttgctttgctttatttgtgaaatttggcaaagaggtggcagttaaaatgaagcagtacaaagatgaacttttggcctcttgtttgacctttcttctgtccttgccacacaacatcattgaactcgatgttagagcctacgttcctgcactgcagatggctttcaaactgggcctgagctatacccccttggcagaagtaggcctgaatgctctagaagaatggtcaatttatattgacagacatgtaatgcagccttattacaaagacattctcccctgcctggatggatacctgaagacttcagccttgtcagatgagaccaagaataactgggaagtgtcagctctttctcgggctgcccagaaaggatttaataaagtggtgttaaagcatctgaagaagacaaagaacctttcatcaaacgaagcaatatccttagaagaaataagaattagagtagtacaaatgcttggatctctaggaggacaaataaacaaaaatcttctgacagtcacgtcctcagatgagatgatgaagagctatgtggcctgggacagagagaagcggctgagctttgcagtgccctttagagagatgaaacctgtcattttcctggatgtgttcctgcctcgagtcacagaattagcgctcacagccagtgacagacaaactaaagttgcagcctgtgaacttttacatagcatggttatgtttatgttgggcaaagccacgcagatgccagaagggggacagggagccccacccatgtaccagctctataagcggacgtttcctgtgctgcttcgacttgcgtgtgatgttgatcaggtgacaaggcaactgtatgagccactagttatgcagctgattcactggttcactaacaacaagaaatttgaaagtcaggatactgttgccttactagaagctatattggatggaattgtggaccctgttgacagtactttaagagatttttgtggtcggtgtattcgagaattccttaaatggtccattaagcaaataacaccacagcagcaggagaagagtccagtaaacaccaaatcgcttttcaagcgactttatagccttgcgcttcaccccaatgctttcaagaggctgggagcatcacttgcctttaataatatctacagggaattcagggaagaagagtctctggtggaacagtttgtgtttgaagccttggtgatatacatggagagtctggccttagcacatgcagatgagaagtccttaggtacaattcaacagtgttgtgatgccattgatcacctatgccgcatcattgaaaagaagcatgtttctttaaataaagcaaagaaacgacgtttgccgcgaggatttccaccttccgcatcattgtgtttattggatctggtcaagtggcttttagctcattgtgggaggccccagacagaatgtcgacacaaatccattgaactcttttataaattcgttcctttattgccaggcaacagatcccctaatttgtggctgaaagatgttctcaaggaagaaggtgtctcttttctcatcaacacctttgaggggggtggctgtggccagccctcgggcatcctggcccagcccaccctcttgtaccttcgggggccattcagcctgcaggccacgctatgctggctggacctgctcctggccgcgttggagtgctacaacacgttcattggcgagagaactgtaggagcgctccaggtcctaggtactgaagcccagtcttcacttttgaaagcagtggctttcttcttagaaagcattgccatgcatgacattatagcagcagaaaagtgctttggcactggggcagcaggtaacagaacaagcccacaagagggagaaaggtacaactacagcaaatgcaccgttgtggtccggattatggagtttaccacgactctgctaaacacctccccggaaggatggaagctcctgaagaaggacttgtgtaatacacacctgatgagagtcctggtgcagacgctgtgtgagcccgcaagcataggtttcaacatcggagacgtccaggttatggctcatcttcctgatgtttgtgtgaatctgatgaaagctctaaagatgtccccatacaaagatatcctagagacccatctgagagagaaaataacagcacagagcattgaggagctttgtgccgtcaacttgtatggccctgacgcgcaagtggacaggagcaggctggctgctgttgtgtctgcctgtaaacagcttcacagagctgggcttctgcataatatattaccgtctcagtccacagatttgcatcattctgttggcacagaacttctttccctggtttataaaggcattgcccctggagatgagagacagtgtctgccttctctagacctcagttgtaagcagctggccagcggacttctggagttagcctttgcttttggaggactgtgtgagcgccttgtgagtcttctcctgaacccagcggtgctgtccacggcgtccttgggcagctcacagggcagcgtcatccacttctcccatggggagtatttctatagcttgttctcagaaacgatcaacacggaattattgaaaaatctggatcttgctgtattggagctcatgcagtcttcagtggataataccaaaatggtgagtgccgttttgaacggcatgttagaccagagcttcagggagcgagcaaaccagaaacaccaaggactgaaacttgcgactacaattctgcaacactggaagaagtgtgattcatggtgggccaaagattcccctctcgaaactaaaatggcagtgctggccttactggcaaaaattttacagattgattcatctgtatcttttaatacaagtcatggttcattccctgaagtctttacaacatatattagtctacttgctgacacaaagctggatctacatttaaagggccaagctgtcactcttcttccattcttcaccagcctcactggaggcagtctggaggaacttagacgtgttctggagcagctcatcgttgctcacttccccatgcagtccagggaatttcctccaggaactccgcggttcaataattatgtggactgcatgaaaaagtttctagatgcattggaattatctcaaagccctatgttgttggaattgatgacagaagttctttgtcgggaacagcagcatgtcatggaagaattatttcaatccagtttcaggaggattgccagaaggggttcatgtgtcacacaagtaggccttctggaaagcgtgtatgaaatgttcaggaaggatgacccccgcctaagtttcacacgccagtcctttgtggaccgctccctcctcactctgctgtggcactgtagcctggatgctttgagagaattcttcagcacaattgtggtggatgccattgatgtgttgaagtccaggtttacaaagctaaatgaatctacctttgatactcaaatcaccaagaagatgggctactataagattctagacgtgatgtattctcgccttcccaaagatgatgttcatgctaaggaatcaaaaattaatcaagttttccatggctcgtgtattacagaaggaaatgaacttacaaagacattgattaaattgtgctacgatgcatttacagagaacatggcaggagagaatcagctgctggagaggagaagactttaccattgtgcagcatacaactgcgccatatctgtcatctgctgtgtcttcaatgagttaaaattttaccaaggttttctgtttagtgaaaaaccagaaaagaacttgcttatttttgaaaatctgatcgacctgaagcgccgctataattttcctgtagaagttgaggttcctatggaaagaaagaaaaagtacattgaaattaggaaagaagccagagaagcagcaaatggggattcagatggtccttcctatatgtcttccctgtcatatttggcagacagtaccctgagtgaggaaatgagtcaatttgatttctcaaccggagttcagagctattcatacagctcccaagaccctagacctgccactggtcgttttcggagacgggagcagcgggaccccacggtgcatgatgatgtgctggagctggagatggacgagctcaatcggcatgagtgcatggcgcccctgacggccctggtcaagcacatgcacagaagcctgggcccgcctcaaggagaagaggattcagtgccaagagatcttccttcttggatgaaattcctccatggcaaactgggaaatccaatagtaccattaaatatccgtctcttcttagccaagcttgttattaatacagaagaggtctttcgcccttacgcgaagcactggcttagccccttgctgcagctggctgcttctgaaaacaatggaggagaaggaattcactacatggtggttgagatagtggccactattctttcatggacaggcttggccactccaacaggggtccctaaagatgaagtgttagcaaatcgattgcttaatttcctaatgaaacatgtctttcatccaaaaagagctgtgtttagacacaaccttgaaattataaagacccttgtcgagtgctggaaggattgtttatccatcccttataggttaatatttgaaaagttttccggtaaagatcctaattctaaagacaactcagtagggattcaattgctaggcatcgtgatggccaatgacctgcctccctatgacccacagtgtggcatccagagtagcgaatacttccaggctttggtgaataatatgtcctttgtaagatataaagaagtgtatgccgctgcagcagaagttctaggacttatacttcgatatgttatggagagaaaaaacatactggaggagtctctgtgtgaactggttgcgaaacaattgaagcaacatcagaatactatggaggacaagtttattgtgtgcttgaacaaagtgaccaagagcttccctcctcttgcagacaggttcatgaatgctgtgttctttctgctgccaaaatttcatggagtgttgaaaacactctgtctggaggtggtactttgtcgtgtggagggaatgacagagctgtacttccagttaaagagcaaggacttcgttcaagtcatgagacatagagatgatgaaagacaaaaagtatgtttggacataatttataagatgatgccaaagttaaaaccagtagaactccgagaacttctgaaccccgttgtggaattcgtttcccatccttctacaacatgtagggaacaaatgtataatattctcatgtggattcatgataattacagagatccagaaagtgagacagataatgactcccaggaaatatttaagttggcaaaagatgtgctgattcaaggattgatcgatgagaaccctggacttcaattaattattcgaaatttctggagccatgaaactaggttaccttcaaataccttggaccggttgctggcactaaattccttatattctcctaagatagaagtgcactttttaagtttagcaacaaattttctgctcgaaatgaccagcatgagcccagattatccaaaccccatgttcgagcatcctctgtcagaatgcgaatttcaggaatataccattgattctgattggcgtttccgaagtactgttctcactccgatgtttgtggagacccaggcctcccagggcactctccagacccgtacccaggaagggtccctctcagctcgctggccagtggcagggcagataagggccacccagcagcagcatgacttcacactgacacagactgcagatggaagaagctcatttgattggctgaccgggagcagcactgacccgctggtcgaccacaccagtccctcatctgactccttgctgtttgcccacaagaggagtgaaaggttacagagagcacccttgaagtcagtggggcctgattttgggaaaaaaaggctgggccttccaggggacgaggtggataacaaagtgaaaggtgcggccggccggacggacctactacgactgcgcagacggtttatgagggaccaggagaagctcagtttgatgtatgccagaaaaggcgttgctgagcaaaaacgagagaaggaaatcaagagtgagttaaaaatgaagcaggatgcccaggtcgttctgtacagaagctaccggcacggagaccttcctgacattcagatcaagcacagcagcctcatcaccccgttacaggccgtggcccagagggacccaataattgcaaaacagctctttagcagcttgttttctggaattttgaaagagatggataaatttaagacactgtctgaaaaaaacaacatcactcaaaagttgcttcaagacttcaatcgttttcttaataccaccttctctttctttccaccctttgtctcttgtattcaggacattagctgtcagcacgcagccctgctgagcctcgacccagcggctgttagcgctggttgcctggccagcctacagcagcccgtgggcatccgcctgctagaggaggctctgctccgcctgctgcctgctgagctgcctgccaagcgagtccgtgggaaggcccgcctccctcctgatgtcctcagatgggtggagcttgctaagctgtatagatcaattggagaatacgacgtcctccgtgggatttttaccagtgagataggaacaaagcaaatcactcagagtgcattattagcagaagccagaagtgattattctgaagctgctaagcagtatgatgaggctctcaataaacaagactgggtagatggtgagcccacagaagccgagaaggatttttgggaacttgcatcccttgactgttacaaccaccttgctgagtggaaatcacttgaatactgttctacagccagtatagacagtgagaaccccccagacctaaataaaatctggagtgaaccattttatcaggaaacatatctaccttacatgatccgcagcaagctgaagctgctgctccagggagaggctgaccagtccctgctgacatttattgacaaagctatgcacggggagctccagaaggcgattctagagcttcattacagtcaagagctgagtctgctttacctcctgcaagatgatgttgacagagccaaatattacattcaaaatggcattcagagttttatgcagaattattctagtattgatgtcctcttacaccaaagtagactcaccaaattgcagtctgtacaggctttaacagaaattcaggagttcatcagctttataagcaaacaaggcaatttatcatctcaagttccccttaagagacttctgaacacctggacaaacagatatccagatgctaaaatggacccaatgaacatctgggatgacatcatcacaaatcgatgtttctttctcagcaaaatagaggagaagcttacccctcttccagaagataatagtatgaatgtggatcaagatggagaccccagtgacaggatggaagtgcaagagcaggaagaagatatcagctccctgatcaggagttgcaagttttccatgaaaatgaagatgatagacagtgcccggaagcagaacaatttctcacttgctatgaaactactgaaggagctgcataaagagtcaaaaaccagagacgattggctggtgagctgggtgcagagctactgccgcctgagccactgccggagccggtcccagggctgctctgagcaggtgctcactgtgctgaaaacagtctctttgttggatgagaacaacgtgtcaagctacttaagcaaaaatattctggctttccgtgaccagaacattctcttgggtacaacttacaggatcatagcgaatgctctcagcagtgagccagcctgccttgctgaaatcgaggaggacaaggctagaagaatcttagagctttctggatccagttcagaggattcagagaaggtgatcgcgggtctgtaccagagagcattccagcacctctctgaggctgtgcaggcggctgaggaggaggcccagcctccctcctggagctgtgggcctgcagctggggtgattgatgcttacatgacgctggcagatttctgtgaccaacagctgcgcaaggaggaagagaatgcatcagttattgattctgcagaactgcaggcgtatccagcacttgtggtggagaaaatgttgaaagctttaaaattaaattccaatgaagccagattgaagtttcctagattacttcagattatagaacggtatccagaggagactttgagcctcatgacaaaagagatctcttccgttccctgctggcagttcatcagctggatcagccacatggtggccttactggacaaagaccaagccgttgctgttcagcactctgtggaagaaatcactgataactacccgcaggctattgtttatcccttcatcataagcagcgaaagctattccttcaaggatacttctactggtcataagaataaggagtttgtggcaaggattaaaagtaagttggatcaaggaggagtgattcaagattttattaatgccttagatcagctctctaatcctgaactgctctttaaggattggagcaatgatgtaagagctgaactagcaaaaacccctgtaaataaaaaaaacattgaaaaaatgtatgaaagaatgtatgcagccttgggtgacccaaaggctccaggcctgggggcctttagaaggaagtttattcagacttttggaaaagaatttgataaacattttgggaaaggaggttctaaactactgagaatgaagctcagtgacttcaacgacattaccaacatgctacttttaaaaatgaacaaagactcaaagccccctgggaatctgaaagaatgttcaccctggatgagcgacttcaaagtggagttcctgagaaatgagctggagattcccggtcagtatgacggtaggggaaagccattgccagagtaccacgtgcgaatcgccgggtttgatgagcgggtgacagtcatggcgtctctgcgaaggcccaagcgcatcatcatccgtggccatgacgagagggaacaccctttcctggtgaagggtggcgaggacctgcggcaggaccagcgcgtggagcagctcttccaggtcatgaatgggatcctggcccaagactccgcctgcagccagagggccctgcagctgaggacctatagcgttgtgcccatgacctccaggttaggattaattgagtggcttgaaaatactgttaccttgaaggaccttcttttgaacaccatgtcccaagaggagaaggcggcttacctgagtgatcccagggcaccgccgtgtgaatataaagattggctgacaaaaatgtcaggaaaacatgatgttggagcttacatgctaatgtataagggcgctaatcgtactgaaacagtcacgtcttttagaaaacgagaaagtaaagtgcctgctgatctcttaaagcgggccttcgtgaggatgagtacaagccctgaggctttcctggcgctccgctcccacttcgccagctctcacgctctgatatgcatcagccactggatcctcgggattggagacagacatctgaacaactttatggtggccatggagactggcggcgtgatcgggatcgactttgggcatgcgtttggatccgctacacagtttctgccagtccctgagttgatgccttttcggctaactcgccagtttatcaatctgatgttaccaatgaaagaaacgggccttatgtacagcatcatggtacacgcactccgggccttccgctcagaccctggcctgctcaccaacaccatggatgtgtttgtcaaggagccctcctttgattggaaaaattttgaacagaaaatgctgaaaaaaggagggtcatggattcaagaaataaatgttgctgaaaaaaattggtacccccgacagaaaatatgttacgctaagagaaagttagcaggtgccaatccagcagtcattacttgtgatgagctactcctgggtcatgagaaggcccctgccttcagagactatgtggctgtggcacgaggaagcaaagatcacaacattcgtgcccaagaaccagagagtgggctttcagaagagactcaagtgaagtgcctgatggaccaggcaacagaccccaacatccttggcagaacctgggaaggatgggagccctggatgtgaggtctgtgggagtctgcagatagaaagcattacattgtttaaagaatctactatactttggttggcagcattccatgagctgattttcctgaaacactaaagagaaatgtcttttgtgctacagtttcgtagcatgagtttaaatcaagattatgatgagtaaatgtgtatgggttaaatcaaagataaggttatagtaacatcaaagattaggtgaggtttatagaaagatagatatccaggcttaccaaagtattaagtcaagaatataatatgtgatcagctttcaaagcatttacaagtgctgcaagttagtgaaacagctgtctccgtaaatggaggaaatgtggggaagccttggaatgcccttctggttctggcacattggaaagcacactcagaaggcttcatcaccaagattttgggagagtaaagctaagtatagttgatgtaacattgtagaagcagcataggaacaataagaacaataggtaaagctataattatggcttatatttagaaatgactgcatttgatattttaggatatttttctaggttttttcctttcattttattctcttctagttttgacattttatgatagatttgctctctagaaggaaacgtctttatttaggagggcaaaaattttggtcatagcattcacttttgctattccaatctacaactggaagatacataaaagtgctttgcattgaatttgggataacttcaaaaatcccatggttgttgttagggatagtactaagcatttcagttccaggagaataaaagaaattcctatttgaaatgaattcctcatttggaggaaaaaaagcatgcattctagcacaacaagatgaaattatggaatacaaaagtggctccttcccatgtgcagtccctgtccccccccgccagtcctccacacccaaactgtttctgattggcttttagctttttgttgtttttttttttccttctaacacttgtatttggaggctcttctgtgattttgagaagtatactcttgagtgtttaataaagtttttttccaaaagta

SEQ ID NO: 874 - DNA, 481 bp, HUMAN
  misc_feature (1)..(481): N=any base
aatgctaatgataacccactaagctgattttgtgacccattaattgtcttgatccagtttgaaaaactctgaattataggctgtgagcactcgctattgttagggttaggataatctaataagcatgaggtaatggctgatgcaaggaaaagactggttaatccagaatggctgataatttttcaaaaagggaaacaaagctggcaataaagggaatggttagcaggaaagcaaataattgaagacagcaacagatgtaggtttgttgggagcgtgaggctccaggaataaataggtggagagggcaatgggcatggtggggctctcacccggatgggnatgatgtggctggggcaggggatgacaggaaggcccctgtccatgagtagactggccatgtgcttgacattgcgctggtgggctcgctcagggcttggacacctctcccttgagcagccgccagattctagagctccagaga

SEQ ID NO: 875 - DNA, 462 bp, HUMAN
attattaaaaataataataaatatggaacacatcataaatttatgtgtcatccttgtgcagggaccatgaaaatcttctctgcatcgttccaattttagtatatgtgctgctgaagcaagcactatactactaattattttttcctctgtttggatacatgggaagtgctgtggaaataaaggattccaggagtcagaaggggctatacatccaaaaccgttatcataatgagaagaattgacctaattccaaagttcagtactgtaattttacaaccacctcagtctctacatgcacagaatgggtgcattaaagacaggtatcacagtgtcatctacccacctcctttaaagaatcactactataggctgggcgcagtggcttatacctgtaatctcagcactttgggagggcaaggtgggcagatcacttgaagtcagaagttggagaccagcctagcc

SEQ ID NO: 876 - DNA, 544 bp, HUMAN
agaaaaaactggctgcttctaagtgcgaagccggctgggcgggctggtgccagaaagggtgtgtcttcactgccctaagatggcctttaaggtatacttttgagggctttcttgggccactttccgtaaacacaggatgcaccgatggcaactggagttgtcatccgatggtggggagaggcgtgcagattttttttgaagggacgagccctgaaggaggataggcagacccaccagggcctcagggtacaagaaacccgaaaaaggactggaggctgcaggcaatacggtggtaggaatctctgccggtttccagcgtcgcggaagcaccaaagggcggtccctgaaggaaacgaggggtcttggggctggagagcggcgcggagcgtggtgggaatatcgtcacaacgccgctgtcctacatttctgtagcgaagacttgattacccctagctattacccgtgcaggagactgggccctggaccccaaatgagccaaagtctagttgagaaaaatttacacagaataacctcggagttcatg

SEQ ID NO: 877 - DNA, 462 bp, HUMAN
actttagacaaaaatattttattttttttttgacttgttattttgagagtataaaagtgatcatattttcctctcttaatgagagcttatatgtaattgcctgctgtcagtgaatcttgggtttaaggcccattagaaaaatagcaggctttagtagagtggttttttccagtgagtacttttcagtcaacaggtttattgggaggtggctaaaatgcacatggaggtgagcccttccctgccagacaagcaaagaatcaagctgtatatttaaaacttggctgttaacccaaaggatttctacaggaagtttttttctcctttgatgtttgtagaggggttttttttcccctcccgacaaaatcaatacacagaaaacccaaagctcttaatttgcaaaactgaatggatttgtgaaaatagatacctttttggcagaaatgcaatttggcattaatccct

SEQ ID NO: 878 - DNA, 782 bp, HUMAN
ttttttttttttcaacctgacctgaggcatcaattcaggcacagtataactctgaccagtaagcggaagtaacccaaatgctttccagggctgaggggacatcatgagagttgtggtcatgtacagaagcacagtcccaggggcacaggtggtacccctgtaaacaaagaatttgcaatattagggcacctcaagcaggacatccattaggctgtacaggtgaacagacctcctaccaggggaactcctgcccaagtgtttccagtcccatctgaaaagttcccagagtccttggcttccaagggactgcctgaaggcagtgagtcccaaacagttttgcttgttcaggatacaagttgatccatctcatgagcatggatgacatttgtgggagatcttcatggaaagcatagaagctagacccactctgttgtcagtctgaactcaaagcactcacagcacatggaaaggcagcactgggaattttccttcagcaagaggaggcttccagggatcaagcctccccaggtgccaggctttaattattttctccaatattacaaaaacagtcgtgccccgttcagcaatcataacattgcattttttcaaccatctcttactctcagctagggcctttctctggaagggttgtatgtaagaggcacaaaagcattcttgtagataaactttttttttttttttttggagaaagggtcgggcctgttggcccagccagagtggcgtgggcaaattttgggctactggcaacccccgcccctggg

SEQ ID NO: 879 - DNA, 356 bp, HUMAN
ggggtgagagggaagtagaaagggcaggaagcaggatcaccaaggggcaacaaggaaattttttgggaggatggctttcttcactatcttgattgtgataatgatttcagctgtatactaaggctcagatattatcaaattgtaatctctaggcagtttattatatgtcaatacctcaataaatctgcctaaaatgttcaaaaattactgtaattacacaaaatacattttataaaaaggaagtcatgagtggagcatggttgagaaccccagcatctggtagattcagaagtggggaaaagcatctctcacttccgctttttcaggccggcgtgctgtgcaatttatccagtggc

SEQ ID NO: 880 - DNA, 3410 bp, HUMAN
gtaccggttcggaattcccgggtcgacccacgcgtccggaaggctacagagagagccaggttttggtgccatgcacacagggaaacttagagttcagagagggggtgtgatttgcctgacctcacacagcaagttagagacccagctccacgactcattgtcttgctgcccagagctgctggctcccctgtttactctgagctgatcgatcaccttagcacacagctggctaggagagaaccatgcagtcacttcggccacacctgcccgttgacccttgctacctcggcaggctttgatcccttctgacctggaggccagaggctaggctgaggtcactcagcagacatcaaggacctgggcagatgggccggctgggatggtggcgagctgtacagataaaaagggacatgaaaatgaaaagcccgagcctgagttttcatcacggttccactcctgagtggtcttgggtgaatcacttcatctgccaaggcctggatttcctcatctgcaaactcagaaaactaaggctttggccctcgtcatcctgcccacccagcggggcttcccaacccaccacacagccatggacgggaaggtggcagtgcaagagcgtgggcctcctgcggtctcctgggtccccgaggagggagagaagttggaccaggaagacgaggaccaggtgaaggatcggggccaatggaccaacaagatggagtttgtgctgtcagtggccggggagatcattgggctgggcaatgtctggaggtttccctatctctgctacaaaaacggaggtggagccttcttcatcccctacttcatcttcttctttgtctgcggcatcccggtgttcttcctggaggtggcgttgggccaatacaccagccaagggagtgtcacagcctggaggaagatctgccccctcttccagggcattggtctggcatctgtggtcatcgagtcatatttgaatgtctactacatcatcatccttgcctgggctctcttctacctgttcagctccttcacttctgagctgccctggacgacctgcaacaacttttggaacacagagcattgcacggactttctgaaccactcaggagccggcacagtgaccccatttgagaattttacctcacctgtcatggaattctgggagagacgagttctgggcatcacctcgggcatccatgacctgggctccctgcgctgggagctggccctgtgcctcctgctcgcctgggtcatctgctatttctgcatctggaagggggtcaagtccacaggcaaggtggtttatttcacagccacgtttccgtacctgatgcttgtcattttgctgatcagaggtgtcacccttcccggagcctaccagggcatcatctactacttgaagccagatttgttccgcctcaaggaccctcaggtgtggatggatgcgggcacccagatcttcttctcctttgccatctgccaggggtgcctgacagccctgggcagctacaacaagtatcacaacaactgctacaaggactgcatcgccctctgcttcctgaacagtgccaccagctttgtggctgggtttgttgtcttctccatcctgggcttcatgtcccaagagcaaggggtgcccatttctgaagtggccgagtcaggtcctgggctggccttcatcgccttccccaaggctgtgactatgatgcccttatcccagctgtggtcctgcctgttctttatcatgctcatattcctagggctggacagccagtttgtctgtgtggagtgcctggtgacagcctccatagacatgttccccaggcagctccggaagagcgggcggcgcgagctcctcatcctcaccatcgccgtcatgtgctacctgatagggcttttcctggtcaccgagggcgggatgtacatcttccagctgtttgactactatgcttccagtggcatatgcctgctgttcctgtcattgtttgaagtggtctgcataagctgggtgtatggggcggaccgtttctatgacaacattgaggacatgattggctaccggccatggcccctggtgaagatctcctggctcttcctgacccctggactttgcctggccactttcctcttctccttgagcaagtacacccccctcaagtacaacaacgtctatgtgtacccgccctggggatactccattggctggttcctggctctgtcctccatggtctgtgtcccactcttcgtcgtcatcaccctcctgaagactcggggtcctttcaggaagcgtctgcgtcacgtcatcacccctgactccagtctgccacagcccaagcaacatccctgcttggatggcagtgctggccggaactttgggccctccccaacaagggaaggactgatagccggggagaaggagacccatttgtagggtgtggccagagcgaggcggctcctaagccgggaacctaggtcagggccaccctccattctcagcggacagcctctgcctctgtctcctgccacaatcctgctgggaactctggagagccacaggcacccccagctggaggccagactcctctcttgtgctagctggagcagctccttcccctttgctgataacaccaccactgggacgtgccatgttgggacgccactccctgtggaaggcaccatcgtttttataaaggggggtctttttggaggccgccatctgattgcaacacctcgagttatgaggattccactgtggggatgcctcttgttagagcgtactgcatttgtacacggggagaggagctataattggaacgcacactgccgtccaatgtggagagcctgatgggacaataccctgttggaagtgacaactgaacacactgtgttggatcggaggttccgttaggggatccttccttaggcttaacgacagaggcaagcctttgcatgccgtcagtctggagtttcctccgagtctctcatggcatctccagctcctgccctagttccgcactgttcttgcagtgtttcatcaactcctggagcattggaatggaaggggcttgggagatgattcctagacttcacaaacactcggcatgcctccctgcactgtccgttcctctgcccaaggccgatattgctaactgatcacagattctttcccacctcacaatcctccgaatgtgctccaggcgacaccatttgccatcctgcttctaacgcaaacccctgacttcatggatgaggaacctggagaccaaagagacaaagggactttttcaagttcacatggggacccccttcttgggggccagagatatgactaaaaccttatctccttgtgctcaggccagtgtcttcccattaaccccctgccttagttaacaagtgtgtatggattgcca

SEQ ID NO: 881 - DNA, 454 bp, HUMAN
tttttttttttttttttttgaactcgagattatttttattatagtcaatgtttttcacacacacacacatatatatacacacacacacacatctaaaatgagtcagattctctgattactcttatgttcattatgtaaactccagtttagaatatttcatctatttaatctgcaatttctagtatattggcataggtttgccgcctgttccattgttagttttggaaaacgtgtgtacgatctgtagggctgtctgctggctcactcccatatggaaatgcatgcctgctctttctttctctttttcattgtagttagaattcatgagtgtgattcatgttttcaagaatgagcttcactggctttgttgaattttcaagctttggtttttcctcatgaacaactcctcttattattgttattattccctttcttacgccttcatttggaataa

SEQ ID NO: 882 - DNA, 339 bp, HUMAN
  misc_feature (1)..(339): N=any base
tttgtattcaattttattggatataaattccacatcagtaaacctgattctcttaaaaatctacacagaaaaaaaaaaagagagagaggttgagttgggtagttgttggtatttttgtttttgtttctttgcttattcagttgaggtttattgtaaaacttgacaccagaaaaaggaagaagtggcgtttttgtgctgtgagcgtgtgacgtgtgtcctttccagagaaaggacagtcatggtgcttttttatcctctctgcccaaagaaggaaagctcttaacagccagcaggaggctttgtagggaccagcgttatcancgccagtcgcgctgacca

SEQ ID NO: 883 - DNA, 1013 bp, HUMAN
  misc_feature (1)..(1013): N=any base
tttggattatatcataagtgtaataggtgacagcctgctgaaacattttaggggcattccttgtacaaaacgtacacataaattaaaaaatcaatttagctttctacaacggtggatgccaacccaaacacatttccagggagaatatttcagttagatgtagatcttcttcatcttgcaaattgacttctgaggtacatgacagtgaatgtcattccagccccattcgtctgaagaacggaaatttattatcgcacaacgctcatcaaggttattgggttcacctgagtgccagaatgtgacaagttcattgtatggtgtctggtcaacccattgccaatgtcgccgaccccctggatctgacagccccagaaaataagaagaatttcttttcagattctgaatgatgaaatcctgttcttccctgggggtgatcaccaccagatcagctcacatcacagaagaggtgctttgactcttagtccaagatgcatcccagtagaaatatagtagcaactaggactgaatgaagtccaggggttgggcagcagctccaatcttctatgtacttatcttacaggacgcaggtcggcttgagtgagaccgttgaactccgtaacttggacgacctctggacgttttgcatacataaaattgtgaggcactcggtcctgaggctctcttcaggcaacaatgtgtgggcgcacacacttggacattctctatcaggtgggtgcgaagcgactggtaaaactttctccaaagatggtgacttgcggagttgtggttgtatgctaaacaggccaagcctcgagagcccttcgcgtctaggcctgaggcangtaggggcatcgcacaccaatgtcaggtcagcacgagagtagcaacttggaggagaagttgatacgtgggagcacgtgactgccagcgcggtagttacgagcatatagaatgggtacgctcgaaggttacgacggtttcgtcgcgcaggcgtgtgggtgtctgctagagtc

SEQ ID NO: 884 - DNA, 486 bp, HUMAN
gagtgagccagatgaagaggagctttattgagtgacagaacagctctgaggaaacccacaggggggcagctcctttctgcagccagggtgtcccaacgtctgttcagctcctagcagaaagggttaggcaagtcgtcccaacaagtgttcagctatcagtagagagggtagctcctctctgcagctggtcgtcccatcatctccctgtcatctttccatcatctctgcagctttcagcaaagagggggccctagagtgggttgctcctgtctgcaggtggtcatcccaacatttgcccagctctggctgagcctggggcttttatgggcctcaaaggggaggaagtgcatgctgtgccaactggtccaagggtggccatgggcaggcccgaaaaaggcaccataagttcccactccagtccacaggactggcagcctggcccccagccttcaagcccttcttggcctgaaggtggggcctcaccaa

SEQ ID NO: 885 - DNA, 448 bp, HUMAN
cttttttcgctctatgccctcctggccccttctccactttccatggtccctccaactcaaagaactcaattatctgcctgcagatttccccttcccctcctcgcagcctgccctaaacacaccctcctcccaagcccatgcagaggcacagaaggaaggccaagccagggctcggaagggctgctgccaggcctcctccagcctcaactatgtgttccccgggcttggctgcctcggccgactctcttaggcccaacgatggaaatggggacgtttccagggcaatgacagttaacagctaagaggagtgacaggaaggaagatgtattcttcaatccttcagtcccaactgccccacagggaggtgcttcagaaggcccaggcctcagagcctcccatctccctgaggtgccaggtggacctcccgtaatgcagttcttagaatcag

SEQ ID NO: 886 - DNA, 513 bp, HUMAN
  misc_feature (1)..(513): N=any base
atctttttgtcaatttattattattatgggctcatgaattcctattccattcaatgtataatctgttactatcatctattttgatggtctaatagtcccagattaccttggaaaccattatgcaatgatttcttagatatgacaccaaaagcacatgcaacaaaaggaaaaatagataaattgcatatcatcaaaattaaaaactttggggcttcaaagaacaccaccaagaaagtgaaaggcaacccacagaatgggaaaaaatatctgccatatatctgctgctggtctagtatccagaatatataaagaacacttccaactcagtaataaaaagaaaactcaattttaaactgggcaaaagtttgggaaaatagctattttcccaaagatatacaatggccaataagcacatgaaagtaaaatcaacattcataaccatccaggaaatgccaatcnaaaccacaaaatggataccagttcacacccactaggagaacttttgtccaggaa

SEQ ID NO: 887 - DNA, 420 bp, HUMAN
tggcaatgaaagaaggcaagtttattagagcaacagtgtatggcaaagtggctgctccccagagcagggttctttcataggcagagctgcccagagcacagcagcagcagcagcagcagtccttatggattgctggctagctatatttatacacagtcttcgttatatgctatttaaggagtaggttattcagaattttctagaaaaggggtgggggagttcctggaaccatataaggaaacttctgggttgttgccatggcatttgtaaactgtcatggcactggtgggactgtctttatgcttattagcagtgagggcaagagggtcacttttggttgctatccgctggtttcggctggtgtctttgctgcatcctgctttgattagtagggtcatgatcggtgctcggaatataagt

SEQ ID NO: 888 - DNA, 484 bp, HUMAN
  misc_feature (1)..(484): N=any base
ttttttttttttttttttttttttttttttttttttttttttttttttttttggggaggggcccacccaatgtttattgaacagcgaaaacaaaaaaaacagcccctggagccctatatggggaaaggaccccttctggacaaaaaaaatattcggggcccatggggtttgagtctgttaaaaaggaccctaaggcccatgggtggggatctttgcgtcataaacacgggggagcccatgggggaacccccccttgtctgtaggtttccaggctgggcccaaaggggagggcaaaaagttgggggtcccaagggatctccccacaacttcctccagggcaggatttccacccaggcccaggctgcccgttcctttccttttccgccagtttgggctgggggtgccacgggtcacacccaaaggaggggggtaggaggccaaggcccccanccccccatgtttcttccccgccccgaaagaggaa

SEQ ID NO: 889 - DNA, 6817 bp, HUMAN
cagctccgaggggagtcggaccggagcaaacagccacccccggcttcgtcccccacgaagaggaagggcaggagccgtgccctcgaggccgtgcccgccccgcccgccagcggcccccgggctcccgccaaggagtccccacccaagagggtgcccgatcccagcccagtcaccaagggcactgcggccgagagcggggaggaggcggcgcgggccatcccccgcgagctcccggtcaagagcagctcgctgctgccggagatcaagcccgagcacaagaggggcccgctccccaaccacttcaacggccgggcagagggaggtcgaagcagagagctgggcagagcggccggagcgcctggagcttctgacgccgacggcttgaagcccaggaaccatttcggcgtgggcaggtcgacagtgaccactaaagtgaccctccctgccaagcccaaacatgtggaactaaatcttaaaacccctaagaatcttgacagtttgggaaatgagcacaatccatttagccagccagttcacaaaggcaacactgccaccaaaatctccttatttgaaaacaaacggacaaacagtagcccaagacacactgacattcgaggcccaaggaatactcctgcctctagtaaaacgtttgttgggagggcaaagctgaatttagccaaaaaagccaaagaaatggagcaacctgaaaagaaagtaatgccaaacagtccccagaatggtgtgctggttaaggaaactgctatagaaaccaaagttaccgtctcggaagaagagattctgccagcaaccagaggaatgaatggagactcttctgagaatcaagctcttggtcctcagcctaaccaagatgataaagcagatgtacaaacagatgctggctgcctttcagaaccagtggcttctgctctgattcctgtcaaggatcataagctcttagagaaggaggactcagaggctgcagacagcaaaagccttgtacttgaaaatgtaaccgatacagcacaagacatccccaccactgtggataccaaagatttacctccaacggccatgccaaagccacagcatacattttctgactcacagtcccctgctgagtcatctcctgggccttctctttcactgtctgcacccgctcctggggatgttcccaaagacacatgtgttcaatcacccataagcagtttcccatgcactgatctaaaagtgtcagaaaaccataaaggatgtgttttgcctgtgtctcgtcagaacaatgagaaaatgccacttttagaacttggaggagaaacaacccctcctttgtccacagagcgtagtccagaagctgtgggaagtgagtgtccatccagagtcctcgtccaggtcaggtccttcgtgctccccgtggagagcacccaggatgtgagctcccaggtcatcccagagagctctgaagttagagaagtgcagttgccaacttgtcacagtaatgaacctgaagtggtttccgttgcaagttgtgctcccccacaagaggaagtactgggcaatgaacactctcattgcacagcagagctcgcggcaaaatctggcccacaagtcataccgccagcatcagagaaaactctgcctattcaggctcaaagtcagggcagcagaacacccctgatggctgaatccagtcccaccaactctcccagcagcggaaatcacttagccactcctcaaaggccagatcagactgttacaaatggccaggatagccctgccagccttttgaacatttctgctggtagtgatgatagtgtatttgattcttcttctgatatggaaaaattcactgaaattataaaacagatggatagcgcagtttgtatgcccatgaaaagaaagaaggccaggatgccaaactctcctgctcctcactttgccatgcctcctattcacgaagaccatttagaaaaggtgtttgatcccaaagtgtttacctttggtttggggaagaagaaggaaagtcagccagaaatgtcaccggctttacatttgatgcagaaccttgacacaaaatccaaactgagacccaaacgtgcatctgctgaacagagcgtcctcttcaagtccctgcacaccaacactaatgggaacagtgagcctctggtgatgccggaaatcaatgacaaagagaacagggacgtcacaaatggtggcattaagagatcgagactagaaaaaagtgcacttttctcaagcttgttatcttctttaccacaagacaaaatcttttctccttctgtgacatcagtcaacactatgaccacggctttcagtacttctcagaacggttccctatctcagtcttcagtgtcacagcccacgactgagggtgccccgccctgtggtttgaacaaagaacagtcaaatcttctgcccgacaactccttaaaggtcttcaatttcaactcgtcaagtacatcacactccagtttgaaaagtccaagccacatggaaaaatacccgcaaaaagagaaaaccaaagaagatctggattcacgaagcaacctacacttgccagaaactaaattttctgaattgtcaaaactgaagaatgatgatatggaaaaggctaatcatattgaaagtgttattaaatcaaacttgccaaactgtgcaaacagtgacaccgacttcatgggtcttttcaaatcaagccggtatgacccaagcatttctttttctggaatgtcattatcagacacaatgacacttagaggaagtgtccaaaataaactcaatccccgacctggaaaggtagtgatatatagtgaacccgacgtctctgagaagtgcattgaagttttcagtgacattcaggattgcagttcttggagcctctctccagtgatactcataaaagttgttagaggatgttggattttgtatgagcaaccaaattttgaagggcactccatccccttagaagaaggagaattggaactctctggtctctggggtatagaagacattttggaaaggcacgaagaagcagagtctgataagccagtggtgattggttccatcagacatgtggttcaggattacagagttagtcacattgacttatttactgaaccagaagggttaggaatcctaagttcctactttgatgatactgaagaaatgcagggatttggtgtaatgcagaagacttgttccatgaaagtacattggggcacgtggctgatttatgaagaacctggatttcagggtgttcctttcatcctggaacctggtgaataccctgacttgtccttctgggatacagaagcagcgtacattggatccatgcggcctctgaaaatgggtggccgtaaagttgaattccctacagatccaaaggtagttgtttatgaaaagcctttctttgaaggaaaatgtgtggaactagaaacaggaatgtgtagttttgtcatggagggaggtgaaacagaagaggcgactggagacgatcatttgccgtttacgtcagtggggtctatgaaagttctaagaggcatttgggttgcatatgagaagcctggatttaccggtcatcagtatttgctagaagaaggagaatacagggactggaaagcctggggaggttacaatggagagcttcagtctttacgacctatattaggtgatttttcaaatgctcacatgataatgtacagtgaaaaaaactttggatccaaaggttccagtattgatgtattgggaattgttgctaatttaaaggagactggatatggagtgaagacacagtctattaatgtactgagtggagtatgggtagcctatgaaaatcctgacttcacaggagaacagtatatactggataaaggattttataccagttttgaggactggggaggcaaaaattataagatctcttctgttcaacctatatgtttggattctttcactggcccaaggagacgaaatcagattcacttgttttcagaaccacagtttcaaggtcacagtcaaagttttgaagaaacaacaagtcaaattgatgattcattttctaccaagtcttgcagagtttcaggaggcagctgggttgtatatgatggagaaaatttcactggtaatcaatacgtgttggaagaaggccattatccttgtctgtctgcaatgggatgcccgcctggagcaactttcaagtctcttcgttttatagatgttgaattttctgaaccaacaattattctctttgaaagagaagacttcaaaggaaaaaagattgaacttaatgcagaaactgtcaatctccgatccctgggattcaacacacaaatacgctctgttcaggttattggtggcatatgggttacttatgaatatggcagttacagagggcgacagttcctattgtcacctgcagaagtacctaattggtatgaattcagtggctgtcgccaaataggttctctacgaccttttgttcagaagcgaatttatttcagacttcgaaacaaagcaacagggttattcatgtcaaccaatggaaacttagaggatctgaagcttctgaggatacaggtcatggaggatgtcggggccgatgatcagatttggatctatcaagaaggatgtatcaaatgcaggatagcagaagactgctgcctgacgattgtgggcagcctggtaacatctggctccaagctaggcctggccctggaccagaatgctgacagccagttctggagcttgaagtccgatggcaggatttacagcaagttgaagccaaatttagttttagacattaaagggggcacacagtatgatcaaaatcacattatcctcaacactgtcagcaaagagaagtttacacaagtgtgggaagccatggtcctatatacctgaacaaagaaggaagaagaatcttctggaggtccttccagccaccttatttcttaaaaaggacaatgctgatggaagaccagactggaaagtggatcgactcctccttcattgattctaaattcaaccttaaatcatgctgccatgactcagagaacttactcatcgtttcaaaagactatcatagctttaaaccaataatttgtcctcctttcatttcttgcctttcatttttggtagctgcttaaacaggttgcctaattagcagcttttgggtgattttgtaaaatgttatatcaagatttcaagactgtgtacattttaaattatttccaaagatagtgacaggagagaactggaacaaatttaccaactttgtggacctacaaagcccttacactttaaagggtaagacaaaggcttaagtttgaaaggtagagaactgtttagcatctgagaagaaatactttattaggcctgtaattttggttcttggccttaaacactttctggaacctttaaatatgctgcatagcacaatgggaaagccttaggtattcacacatttaaggaactctaaacaaaatactattttcctttagttcatattaaaaattaatacattttaaaaatttaatgtcaaagtctggtaacatttgttagtaggatttgagttattattttttgagacaggatctcaggctggagtgcagtggcacaatcacggctcactgcagcctctacctccccaggctcaggtgatcctcccacctcagcctcccaagtagctgggactataggcacacatcaccaagcccagccaaattttgttttttttttgtagagatggggtttcatcacgttgcccaggctgatctcgaacctctgggctcaagcaattcactcgcctcggcctcccaaaatgctgggattacaggcctgagccactgcgcccagccaggatttgaattattttaactcatccatgggctgccctagaatgtcacaaatgagggttgtttaatgcctttcttatagctgctactggaacactattatgacctaatttatgagccatccttactcatctacaagtgctgaagcaatgttacatacttttttgctaaactcagattttttagcctaatttcttgtcctcctatccacctgcatccacacatggcctgcatggggctgccttccctgcagtgttctgcagccatgcttcagggtatagctgttggtggacagcctcaggtcttgggggcactatagccactaaacgaggtgtgaaaggctcaagaggatgaccagcaattaattatccccagaaagtgaaggaaaagagacctttagggatgttgctggtcaagtcttgatttgaccggagtcaaatcaatcttcaagcaatcttggaatcctcaactgcagtaagcatttcaaaatgcaaacaaactgcttaacaactgacaagacaccagcccatatgctgctcttccaacagtgggttctagctttgaacaaaagtgctaaacatttccttgaatatattcttcctctttttgtcctcatcactcaatactggtgctcttgtcacaggtagaacagcttgtttcttttccatctattcaagtgtgtttctaattctaaaatgctgatcttctctggagtctatggtaggcaattatggtcactggaatagtttgtcttgttttaaaatattattggtgcatgtacaacagcatccaacatatctgtcttgttcctagatatatagctctgattttaggccttttgtgcataccattacaatatggtggggtaagacattctacagtagcctgtgctgaactgatctcttaaataaacttgcttctggttaactaaaaaaaaaaaaaaaaaaaaa

SEQ ID NO: 890 - DNA, 291 bp, HUMAN
gagaagacgacagaagggagttccaaataggcagtttgtgactgatgatgagcatgttgatgataaagtctcctttatataacagccggcagacgacttggtcacgcccacacattttaaattcacataaaggtaaatatatggtcaggcgtggtggcccacacctgtagtctcagcaccttgggaggcgaaggcgggtggatcatttgaggtcaggagttcaagaccagtctggccaacatggtgaaactctatctctaccaaaatacaaaaaaaaaaaagtcgtatcga

SEQ ID NO: 891 - DNA, 450 bp, HUMAN
agttcaaatatatacctttatttgaacaagagaatggaggactaggataaaacctacctgggtgaggcagccaaatccatggtgccttggtgggggcagacagttcctgggggataacactgaatcccacaaaggcagaaacaatccacacacaggccactgggatcagcacctgaggggcgagactgagaaaagaactcctcccccaaaaccttctgagccagccttgcaggggtagacagaagccaaaaggtaggggatggagtgagcactccaggccagcccttctgacctctactgccctgcccagacccacacataccgaaaggagccggaagacagggagaggagtgtgagttgatgacgttgaagctcgcctccaggggcacacatgaaactggcaggagcccaggtgctgagaacagaccaccatgagcaggataaccctag

SEQ ID NO: 892 - DNA, 401 bp, HUMAN
ttttaaaatgttttatttttatttcacctaatatgtacacatagttatataattttgcttagtgaaaagttcatgttttaggttccaagaacttggccaaacttgaacgctggagagaagcgaaattcactccctagctctggaaaggggaatttggtagaagacggatctcatccttccaatttcttcccctcaggtagttttctgtaaataattttatgaaaagtatagcaggattctctgttccagtggttatagacaatgggattgacaatcaaatttgcatgtgacaagagaatggtcatcttccttgcccacttgggcttatctttagcctgagctagctgaaaaagagtgacacagtccatggtgcgcactggtagcgagcacagagcaaacat

SEQ ID NO: 893 - DNA, 3176 bp, HUMAN
tgataacccaaggtattcacagcaagatacagtgagtcttaaagttaagcaccgtgcaattagctttgcttccttgggtttttgaaacatgcatctgtataaacctgcctgtgcagacatcccgagccccaagctgggtctgccaaaatccagtgaatcggctctaaaatgtagatggcacctagcagtgaccaagactcagcctcaggcggcctgcaaacctgtgaggcccagtggagcagccgaacagaaatatgtggaaaagtttctacgtgttcatggaatttcgttgcaggaaaccaccagagcagagacgggcatggcatacaggaatcttggaaaatcaggactcagagtttcttgcttgggtcttggaacatgggtgacatttggaggtcaaatttcagatgaggttgctgaacggctgatgaccatcgcctatgaaagtggtgttaacctctttgatactgccgaagtctatgctgctggaaaggctgaagtgattctggggagcatcatcaagaagaaaggctggaggaggtccagtctggtcataacaaccaaactctactggggtggaaaagctgaaacagaaagagggctgtcaagaaagcatattattgaaggattgaagggctccctccagaggctgcagctcgagtatgtggatgtggtctttgcaaatcgaccggacagtaacactcccatggaagaaattgtccgagccatgacacatgtgataaaccaaggcatggcgatgtactggggcacctcgagatggagtgctatggagatcatggaagcctattctgtagcaagacagttcaatatgatcccaccggtctgtgaacaagctgagtaccatcttttccagagagagaaagtggaggtccagctgccagagctctaccacaaaataggtgttggcgcaatgacatggtctccacttgcctgtggaatcatctcaggaaaatacggaaacggggtgcctgaaagttccagggcttcactgaagtgctaccagtggttgaaagaaagaattgtaagtgaagaagggagaaaacagcaaaacaagctaaaagacctttccccaattgcggagcgtctgggatgcacactacctcagctagctgttgcgtggtgcctgagaaatgaaggtgtgagttctgtgctcctgggatcatccactcctgaacaactcattgaaaaccttggtgccattcaggttctcccaaagatgacatcacatgtggtaaatgagattgataacatactgcgcaacaagccctacagcaagaaggactatagatcataaggcaatgcatgaaccacagaagctgcatggttaaaatagcggcctgtgcccagtacagaaaggtgttactaaccagtcttttgaatcacttagcagcttgctcgtcaacctctagtgtccctccctggattctttgaggtgtctgctgtcgctaccactgtgcacatctgaaaactcacaaccaagaaaatccattctattttcttatcttggactggagtcacctattcttgcattgctgtatacacctcatgcttatgcaatgggaagaatatgggggccagggggtgtggtactaccttcaggcatttggtaactcaaagaaggctgtacagatatattttttcaaaaagaacaaaatccacagatgcaatgtgagttgcgtaagaaacagagtagatagactaaattcagtgaaggaaaggaattgagagatttttcttagtaaatagattattgttaagtaaatagttattaaaaatatatctcactgcaaaaaaaaaaaaagcagtatcttcactcaaaagtcttgcttggaagaataagcagaaagaattttatatattttttttctattttcacattcatactaacaagttttgttccatttgttattcaataaaacaaaaatttctaggtatttgctttattacctttcaaatatttactgttgcttggccccaagaatggccttgtacaacttatccagaatgtctattaggattctaatgttatgtccacttacaagtagagacagtaaaaggatgaatacccaatctttagtgacaatgcagctgatttatgaaagagagggctacactgctatggaaacttagcttcaaagaaaatgcaatgtatctgcaattaggtgttcattttttactacattttattaaaacctgctttatactttcaactgcttgtaggcacaacttctgcaagtttaaatatttgagctttacaaataaacatacacatgctcagtttttttaagtaaacctgtaaaatacccaggaaggcaaatgttcattgtttaattagcactgggattttataatataatgtttggtatttttgaggcattgttaacatgaaagtcaaccactggctttgtgaaaaatgctatgtcactattcagaatatgctgggtaaattaacttgcctagtgaaaagcaaaatgttaaagaaagaacttctggttctataatcatattatatgcactaaactatatgcatgaaagttctttgcatggattaatggggcttacccttgttgcactcgaaatctgaggtgtatctagccctgccactattggctacttaccctcattaatatcccacttgagaaaaattgtgagactatactgtgtcaatatctgtaaaaagagagaaaacatgtttttttttttttgaagggggtggtgtgggagtggccctttaactcctatttggctatctgaggatgtacaaaattctcatttaattttctggtcagcaagttccccacacagaaatcactctgaggtttacagaagaactgtaatattattttaaaatgcgattttctgtcattagttctagatatgtacttcatggttaaattctaaatctgaaaatgctagtgggagatatcaagaaattttctttttgattactagtacctgtattctaacagagagtttgaattttttgcccgtgttatcagaatgatggaaattgatcattttcagttgttcattgtgtattcaatccagctgaactgctgtatgtatagaggagcttgaggtgctgtctaatgggaaatgtgatttgattgatttatttgcttagagtaataaaagcattttgtgcattcaatctt

SEQ ID NO: 894 - DNA, 979 bp, HUMAN
atggctctgcagatccctggaggcttttgggcagcagctgtgaccgtgatgctggtgatgctgagcaccccagtggctgaggccagagactttcccaaggatttcttggtccagtttaagggcatgtgctacttcaccaacgggacagagcgcgtgcgcggtgtggccagatacatctataaccgcgaggagtacgggcgcttcgacagcgacgttggggagttccaggcggtgaccgagctggggcggagcatcgaggactggaacaactataaggacttcttggagcaggagcgggccgcggtggacaaggtgtgcagacacaactacgaggcggagctgcgcacgaccttgcagcggcaagtggagcccacagtgaccatctccccatccaggacagaggccctcaaccaccacaacctgctggtctgctcagtgacagatttctatccagcccagatcaaagtccggtggtttcggaatgaccaggaggagacagccggtgttgtgtccacctccctcattaggaatggtgactggaccttccagattctggtgatgctggaaataactccccagcgtggagacatctacacctgccaagtggagcaccccagcctccagagccccatcaccgtggagtggcgggctcagtctgaatctgcccagagcaagatgctgagtggcattggaggcttcgtgctggggctgatcttcctcgggctgggccttatcatccgtcacaggggtcagaaaggacctcgagggcctccaccagcaggtcaccttctgtgatccccatcccaaggcactggtggtgactctgcttcctgcactgacccagagcctctgcctgtgcactgcaagctgtgtctactcaggccccaaggggactctctgtttccattctccccccacagacctgtcaagagaagcatgacaaacaaaatcatttaccgactttagtgcttttttccat

SEQ ID NO: 895 - DNA, 458 bp, HUMAN
  misc_feature (1)..(458): N=any base
caatagttcctttccttatttattagattccagatacatgggaccaggatggaagcatcctagggcatttgatttacatgggggtttctgggagaacatatacagaggcagaaagacatacaagtaggtgatgctgcaatggggaactgccattttaaaaaatatatacatcttaagaagccattccagccatattatcattattagaaaataaaacaatctttccacatagtgcttttctttggtgctgttccgtgagcatggactctggacccttcagtcttcttgtcacaagctggtcaccctcccctgccacttccatctgcacagagggagggcagagtctatggggaaaggaggccccccccaccgacacaggtgggtngcaggttccagctcctctaaggcgctgccatnggccttcccgactctggctggagtcttgagagcctcttact

SEQ ID NO: 896 - DNA, 556 bp, HUMAN
  misc_feature (1)..(556): N=any base
tttttgtcttgcctgttatttttattatttgacattctttaattttgaaaagacacactggacttgattaagatctggctcttcattgtctccagtcaaatgtcctgtggcgactctctgtggtactgacccttcacatcttggtttgatatggcttactttgtgcaaagagagggtacagtggagggagtgtatggcggtggactcccaggtgcaggctgcataaactttggtcaagtctgaagcttctacatcttcattctgtggctctcttaaggccatcaggcaagcttctgtgcagattgccttgatgtcagcaccaaagaggtcatctttagtcattatcaagtcgttcaggtttacatcatcggccagtgtcatcatgcttgtatgcatctgaaagatgctcttcttagtatgttcattacggaggggaatgccgatcttcctgtcagtgcaggctcgcctgctaagggctgnatacaaaattctgtttggttgccgcatgataactttacatgtnctctagatcaaatccatcaactgttcgcagttc

SEQ ID NO: 897 - DNA, 716 bp, HUMAN
  misc_feature (1)..(716): N=any base
tttttttttccaaattattaaatttttttaattaaaaaattttttaaaattatatttgcatatatgaaggtaagtaagacactggacaaattatagagtctcaggcttatgtggaattatgactgctctcaacaattactgaaatcccctttcaaagaaaatcttcacataaacctatgtttgactatgtaatagaatgaagacagccacagatctggcattctcaaaacatcacacaagtactgcatgtaatgctgcaaaataactgttttcctctaaaatttcactaaacaacctcaggcagtacaataaaacaaaacattaagacctcccagtggtcatcctaagaattagacagatttctttgattttttcttctctgcttcttccttttccttttctatttcagttacatataattcaacttcttttgcactaaacatcttcaaaggttgatttcttcttattatagcaagttcaatgttttttccaccagactggacaacttctagcaaagcttttattgctaacttgatagcttcactgtcacttgctatggcatcttctgtgtaattcttttctagaaattctcgaacagttttagcacttcggcctattgcatttgccttccaagcatgataagtaccaaaaggatctgtctgatacaatcttggagatncattattattcaaaccctccaattaaggcggaatacc

SEQ ID NO: 898 - DNA, 439 bp, HUMAN
tatttgcattattttttactgttgtcttgttcttttttatgttttgcatcctgaatatatttgctccacagttggttgaccctacgtaattccatggatgcaggacccacaaatgtggatggccgaccgcacttagagaatgctcacctgtctgcagccaagggctggaatcacacatctggctgactcactgaaccacaggtgtagctctcagagcctccgggttggaccgaaagaacacagcgtggagtaggctccacggactacctcatgggaccactcctcagggaaagcctctggaaaatatcgcgccccccaagaagggaaaaggaggagtgcaggagggtggcgcacccacaaaggacccaacgccgggaagaggcagaggatgctgggaagagagaagcctccttgccctgacacagatatttcttcctct

SEQ ID NO: 899 - DNA, 327 bp, HUMAN
taaaatttatactatcaataattgagtttatttcaattaataatgttaacaatgacacatttaacattatgttagagctcaatttgtatatattaacatgtatttttaaataatttacgtatttatcgtcgaatcatgtattttttttaaagggggatgctcaactctctcaggcaaaaatgagcacctttccgaacaccgtggggagaggcagggatgcaggcagacatatcctaaactcaccctcccggcagcatcaaagtagccttcggcagggatttgttataatcagataaggattcgggaaggccctttgagccatgacgc

SEQ ID NO: 900 - DNA, 450 bp, HUMAN
  misc_feature (1)..(450): N=any base
ggcaatagaacctagaagtcagggaagctcatcccccaaggctcaggaaagctcccaggnaantggaatcttatctgcatgtccctacttgcactcagcagagggccgcagaaggatcctgttcagggctttaaggaactaaagcattggaaggcatcccatttctacgggagattggaatagagccctggctgttctggccagtccctgtctcagatgttgcacttccagcacattctacagttattctagagagctacaagcaagaaagaggggagtctgtgttggtacaaggccacctggggagctgtccctcagagctatcccagtactcaggagaagttacaaatgtggataagtccagagtttgaatcaagatagacctccaagataatgtctttttgtgaggatttgaagntagtcttgaaancaaattagttctttttaaaa
